(19) United States
(12) Patent Application Publication
(10) Pub. No.: US 2009/0233942 A1
(43) Pub. Date: Sep. 17, 2009

(54) Genetic markers associated with response to antidepressants

(76) Inventors: Maria Athanasiou, Fond du Lac, WI (US); Kerri Holick, Brookfield, CT (US); Carol Reed, Bethany, CT (US); Benjamin Salisbury, Dayton, OH (US); Alessandro Serretti, Bologna (IT); Wei Zou, New Haven, CT (US)

Correspondence Address: ROPES & GRAY LLP, PATENT DOCKETING 39/361, 1211 AVENUE OF THE AMERICAS, NEW YORK, NY, 10036-8704, US

(21) Appl. No.: 12/077,160

(22) Filed: Mar. 13, 2008

(51) Int. Cl. A61K 31/497; C12Q 1/68

(52) U.S. Cl. 514/254.08; 435/6

(57) ABSTRACT

Markers of the ACE, ATP5C3, BCL2L1, CYP2C9, DRD3, FOS, DTNBP1, GABRG3, GRIA4, LAMA4, MAPK1, NPY1R, OPRD1, OPRM1, PER3, PLCB1, PSMD1, ABI1, LOC402382, and NCALD genes, and their association with response to antidepressants are disclosed. Compositions and methods for detecting and using these markers in a variety of clinical applications are disclosed.

### SEQUENCE LISTING

[0001] This application contains a lengthy Sequence Listing which has been submitted via CD-R in lieu of a printed paper copy, and is hereby incorporated by reference in its entirety. The CD-R, recorded on Mar. 10, 2008, are labeled CRF, “Copy 1” and “Copy 2”, respectively. Each contains only one identical 1.48 Mb file (161531US.txt). The sequence listing was prepared in IBM-PC/MS-DOS format.

### FIELD OF THE INVENTION

[0002] This invention relates to the field of pharmacogenetics. More specifically, this invention relates to certain variants of the ACE, ATP5C3, BCL2L1, CYP2C9, DRD3, FOS, DTNBP1, GABRG3, GRIA4, LAMA4, MAPK1, NPY1R, OPRD1, OPRM1, PER3, PLCB1, PSMD1, ABI1, LOC402382, and NCALD genes, and their association with response to antidepressants.

### BACKGROUND OF THE INVENTION

[0003] Depression is an illness that occurs with a frequency of approximately five percent in the general population, and is associated with significant morbidity and mortality. Approximately one out of every thousand of the general population is admitted to a hospital annually with depression, and around three out of every thousand are referred to psychiatrists. (DEPRESSION: AN INTEGRATIVE APPROACH, Paykel, Heinemann Publ. (1989)). The core features of depressive illness include depressed mood and loss of interest or pleasure in nearly all activities. There are numerous additional symptoms which include changes in appetite or weight, sleep and psychomotor activity, loss of energy, feelings of worthlessness or guilt, difficulties in thinking, concentrating or making decisions, and recurrent thoughts of death or suicidal ideation. The diagnosis of Major Depressive Disorder (MDD) focuses on the occurrence of the core symptoms plus at least four of the additional symptoms having been present for at least two weeks. (DIAGNOSTIC AND STATISTICAL MANUAL OF MENTAL DISORDERS, 4^{th} ed., American Psychiatric Association (1994)).

[0004] Inter-individual variability in response to antidepressants is well documented, with 30-40% of depressed patients not responding to initial treatment. (Vaswani et al., Progress in Neuro-Psychopharmacol. & Biol. Psych. 27:85-102 (2003)). Evidence of a genetic component in the variability of response is seen in a study showing that the response of one family member to a particular antidepressant predicts the response of a first degree relative to that same drug. (Mancama et al., CNS Drugs 17:143-51 (2003)). Antidepressant response may be due to genetic differences in drug metabolism, in the mechanism of action of the drug, or in the disease (or disease sub-type) itself.

[0005] In the case of selective serotonin reuptake inhibitors (SSRIs), genetics has already been demonstrated to contribute to response. Specific variants of certain genes, including tryptophan hydroxylase, G protein beta 3, beta adrenergic receptor 1, angiotensin-converting enzyme, and interleukin 1 beta have been shown to have an association with treatment with SSRIs. (Serretti et al., Psychopharmcol. 174:490-503 (2004)). It would be beneficial to discover other genes which show an association with antidepressant response.

[0006] The ACE gene encodes the angiotensin I-converting enzyme and consists of 42 exons. Mattei et al. assigned the ACE gene to 17q23 by in situ hybridization (Cytogenet. Cell. Genet. 51:1041 (1989)). Angiotensin I-converting enzyme, or kinase II, is a dipeptidyl carboxypeptidase that plays an important role in blood pressure regulation and electrolyte balance by hydrolyzing angiotensin I into angiotensin II, a potent vasopressor, and aldosterone-stimulating peptide (http://www.ncbi.nlm.nih.gov/sites/entrez?db=omim).

[0007] An insertion/deletion of 287 bp has been identified in intron 16 of the ACE gene that has been demonstrated to affect response to antidepressants. Patients with one or two copies of the deletion allele showed a greater improvement in symptoms as measured by the Hamilton Depression Rating Scale (HAMD-17) after four weeks of treatment. (Baghai et al., Neurosci. Lett. 363:38-42 (2004); Bondy et al., Biol. Psych. 29:1094-1099 (2005)). In the central nervous system, the primary function of ACE is to degrade neuropeptides including substance P. Monoamine reuptake inhibitors have been shown to reduce substance P content in various rat brain regions. (Shirayama et al., Brain Res. 739:70-8 (1996); Brodin et al., Neuropharmacol. 26:581-590 (1987)), and substance P antagonists have successfully shown antidepressant efficacy in patients (Kramer et al., Science 281:1640-5 (1998)).

[0008] The ATP5G3 gene, mapped to nuclear chromosome 2q31.1, encodes the C3 (subunit 9) isoform of F₀. (Yan et al., Genomics 24(2):375-7 (1994)). F₀, the inner mitochondrial transmembrane component, conducts protons down a gradient to the F₁ component on the matrix side of the mitochondrion and the energy captured during this transition is utilized by the F₁ component to generate ATP, the ubiquitous energy storing molecule used by all cells. (Cross, Nature 427(6973):407-8 (2004)). Many neuronal functions (e.g., neurotransmitter vesicle filling, vesicle fission, and membrane coated pit formation) require ATP producing mitochondria, which often traffic to and co-localize with active synaptic regions. (Li et al., Cell 119(6):873-87 (2004)). Moreover, altered expression of ATP biosynthesis-associated genes were found in suicide victims with major depression. (Klempan et al., Mol. Psychiatry (electronic publ.) (2007)). These findings suggest that abnormalities in the mitochondrial electron transport chain may play an important role in psychiatric and neurologic diseases.

[0009] BCL2-LIKE 1 (BCL2L1, BCLXL, BCLXS), located on nuclear chromosome 20q11.21, encodes two isoforms (BCLXL and BCLXS) of the BCL-2 family via splicing and plays a role in mitochondrial function. BCLXL, which is regulated by the MAPK pathway, inhibits programmed cell death (apoptosis), whereas BCLXS promotes apoptosis. In a rat depression model, stress corresponded with decreased BCLXL expression the hippocampal CA1, CA3, and DG subfields and chronic administration of the antidepressants, reboxetine and tranylcypromine, increased BCLXL expression in the CA1 and DG subfields. (Kosten et al., Neuropsychopharmacol. (electronic publ.) (2007)). Of note, increased hippocampal apoptosis has been identified in post-mortem samples from depressed patients (Lucassen et al., Am. J. Pathol. 158(2):453-68 (2001); Lucassen et al., CNS Neurol. Disord. Drug Targets 5(5):531-46 (2006)) and BCLXL has been shown to bind the recently identified MDD susceptibility gene, APAF-1. (Harlan et al., Mol. Psychiatry 11(1):76-85 (2006)). Taken together, there appears to be a link between BCLXL and depression.

[0010] The cytochrome P450 2C9 (CYP2C9) gene located on nuclear chromosome 10q24 encodes one of the major drug metabolizing CYP450 isoforms. The CYP450 isoenzyme superfamily, predominantly present in the liver and brain to a lesser extent, catalyzes the oxidation of many drugs and chemicals. (Llerena et al., Acta Psychiatr. Scand. 87(1):23-8 (1993)). CYP2C9, as well as CYP2D6 and CYP2C19, play a role in SSRI metabolism (Brosen, Therapie 59(1):5-12 (2004)) and certain SSRIs can selectively inhibit CYP450 isoforms. Sertraline, for example can partially inhibit CYP2C9 and fluoxetine can inhibit CYP1A2, CYP2C19, CYP2D6, and CYP3A4. (Harvey et al., J. Clin. Psychopharmacol. 16(5):345-55 (1996)). The inhibition of CYP450 isoforms can not only raise SSRI concentrations, but my also raise concentrations of additional medications the patient is taking for other indications, thereby increasing the likelihood or severity of drug-drug interactions. (Matchar et al., Evid. Rep. Technol. Assess. (Full Rep.) (146):1-77 (2007)). Moreover, genetic polymorphisms have been identified in CYP450 genes that correspond to increased, partial, or deficient enzyme activity, which allow classification of these individuals as ultra rapid metabolizers (UMs), intermediate metabolizers (IMs), and poor metabolizers (PMs), respectively. (Id.). Wild-type patients are considered to be extensive metabolizers (EMs) who have normal enzyme activity. (Id.). Although a large meta-analysis focused on CYP450 polymorphisms and non-psychotic depression showed mixed results and called for larger prospective studies (Id.), a CYP2C9 polymorphism that decreases enzyme activity was observed at a significantly higher frequency in subjects with MDD compared to healthy subjects or those with schizophrenia. (Llerena et al., Pharmacogenomics J. 3(5):300-2 (2003)). This same polymorphism, in combination with a polymorphism in the serotonin transporter, 5-HTT, was later shown to increase the risk of MDD. (Dorado et al., Fundam. Clin. Pharmacol. 21(4):451-3 (2007)). Although associations between CYP450 polymorphisms and depression are still controversial, there is a definitive association between CYP450s and antidepressant metabolism.

[0011] The dopamine receptor D3 (DRD3), located on nuclear chromosome 3q13.3, encodes the D3 subclass dopamine (DA) receptor. There are two major families of dopamine receptors, D1 and D2, and DRD3 is a member of the D2 family. Both families include GPCRs and are coupled to Gₛ and Gᵢ or Gₒ proteins capable of activating or inhibiting second messenger signaling cascades, respectively. (Neve et al., J. Recept. Signal Transduct. Res. 24(3):165-205 (2004)). The modulation of these cascades leads to phosphorylation/dephosphorylation of channels and receptors that modulate cell excitability (Tseng et al., J. Neurosci. 24(22):5131-9 (2004); Wang et al., Proc. Natl. Acad. Sci. U.S.A 101(14):5093-8 (2004)), glutamate and GABA neurotransmission (Gao et al., Proc. Natl. Acad. Sci. U.S.A 98(1):295-300 (2001); Seamans et al., J. Neurosci. 21(10):3628-38 (2001)), and synaptic plasticity (Seamans et al., Prog. Neurobiol. 74(1):1-58 (2004)). For example, D2 activation can decrease NMDA and AMPA responses of prefrontal cortex pyramidal neurons (Tseng et al., supra (2004)) and D1 activation appears capable of modulating GABA release in prefrontal cortex interneurons. (Gorelova et al., J. Neurophysiol. 88(6):3150-66 (2002)). A recent meta-analysis looking for an association between decreased mood and DA levels found an association in subjects with a family history of MDD and in drug-free subjects with MDD in remission. (Ruhe et al., Mol. Psychiatry. 12(4):331-59 (2007)). However, no association between DA and decreased mood was observed in healthy subjects (Id.). These data suggest a link between depression and dopamine.

[0012] Finkel-Biskis-Jinkins (FBJ) murine osteosarcoma virus oncogene homolog, FOS (also known as c-fos) is located on nuclear chromosome 14q24.3. FOS is a major component of the AP1 transcription factor complex which includes members of the JUN family. As an immediate-early gene, c-fos expression is often used as a marker of neuronal activation because it is induced by several stimuli and the number of cells expressing c-fos is dependent on the stimulus intensity. (Lino-de-Oliveira et al., Brain Res. Bull. 55(6):747-54 (2001)). Increased c-fos expression in many areas of the brain, including the midbrain periaqueductal gray matter (PAG) region, has been shown in rat restraint (Id.) or swimming (Bellchambers et al., Neuroscience 83(2):517-24 (1998)) models of stress. Conversely, administration of the antidepressants desipramine or clomipramine decreased the level of c-fos in the PAG brain region. Moreover, administration of reboxetine or fluoxetine to unstressed rats also showed a corresponding decrease in c-fos staining in the brain (Miyata et al., Psychopharmacol. (Berl.) 177(3):289-95 (2005)). Taken together, there appears to be a link between FOS, depression and antidepressant action.

[0013] The dysbindin gene, located on nuclear chromosome 6p22.3, encodes dystrobrevin-binding-protein 1 (DTNBP1). DTNBP1 binds to the β-dystrophin protein complex, and Duchenne muscular dystrophy is caused by the absence of dystrophin. (Knuesel et al., Eur. J. Neurosci. 11 (12):4457-62 (1999)). In the brain, dysbindin is thought to play a role in synaptic function and modulate neuronal receptors (Kim et al., Prog. Neuropsychopharmacol. Biol. Psychiatry 32(2):375-9 (2008)). Indeed, dystrophin appears to be involved in the clustering and/or stabilization of GABA receptors in post-synaptic densities. (Knuesel et al., supra (1999)). Moreover, dysbindin has been shown to influence synaptic glutamate release and glutamate modulation has been associated with antidepressant response (Numakawa et al., Hum. Mol. Genet. 13(21):2699-708 (2004); Pae et al., Pharmacogenet. Genomics 17(1):69-75 (2007); Straub et al., Am. J. Hum. Genet. 71(2):337-48 (2002); Yoshimizu et al., Psychopharmacol. (Berl.) 186(4):587-93 (2006)). The effects of dysbindin and dystrophin on synaptic structure and neurotransmission suggest a contribution of this gene to the neuronal plasticity hypothesis, which claims antidepressants may work, in part, by inducing neurite sprouting. Although attempts to link DTNBP1 polymorphisms to MDD have been controversial (Kim et al., supra (2007); Zill et al., Am. J. Med. Genet. B. Neuropsychiatr. Genet. 129(1):55-8 (2004)), a recent study has demonstrated a link to antidepressant response. (Pae et al., supra (2007)).

[0014] The gamma-aminobutyric acid (GABA) A receptor gamma 3 (GABRG3) gene, located on nuclear chromosome 15q11.2, encodes the gamma-3 subunit of the GABAA receptor. GABAA is an ionotropic receptor that allows for increased Cl⁻ conductance following binding of the inhibitory neurotransmitter GABA. (Zeng et al., Brain Res. 868(2):202-14 (2000)). GABA is expressed in 10-40% of the nerve terminals located in the cerebellum, substantia nigra, and hippocampus (Hendry et al., J. Neurosci. 7(5):1503-19 (1987)), where it serves two main functions: as an inhibitory neurotransmitter and as an intermediate in energy metabolism. (Hassel et al., J. Neurochem. 71(4):1511-8 (1998)). Through its inhibitory actions, GABA plays a role in the modulation of sleep, feeding behavior, aggression, sexual behavior, pain, cardiovascular regulation, thermoregulation, locomotor activity and mood. (Paredes et al., Neurosci. Biobehav. Rev. 16(2):145-70 (1992)). With respect to mood, depression specifically, GABA transmission may play a role in neuronal plasticity, a mechanism recently implicated in antidepressant mode of action. (Ge et al., Nature 439(7076): 589-93 (2006); Hensch, Nat. Rev. Neurosci. 6(11):877-88 (2005); Overstreet-Wadiche et al., J. Neurosci. 26(8):2326-34 (2006)). Moreover, GABA levels are decreased in antidepressant-free depressed patients compared to healthy controls (Sanacora et al., Arch. Gen. Psychiatry 56(11):1043-7 (1999)) and this effect is observed in unipolar but not bipolar depressed patients. (Krystal et al., Mol. Psychiatry 7 Suppl 1S71-S80 (2002)). In animal models, depression-associated reductions in cortical GABA (Petty et al., Pharmacol. Biochem. Behav. 15(4):567-70 (1981)) could be ameliorated by antidepressant treatments, including electroconvulsive therapy. (Lloyd et al., Prog. Neuropsychopharmacol. Biol. Psychiatry 13(3-4):341-51 (1989)). In human studies of depressed patients receiving serotonin reuptake inhibitor treatment, the magnitude of treatment related rise in cortical GABA levels correlated with the degree of GABA deficit. (Krystal et al., supra (2002)). In other words, depressed patients with larger cortical GABA deficits experienced larger antidepressant-induced GABA level increases. These studies suggest a link between GABA signaling, depression and antidepressant action.

[0015] GRIA4 (GluR4), located on nuclear chromosome 11q22, encodes one of the four subunits of AMPA-type ionotropic glutamate receptors. AMPA receptors (AMPAR) are heterooligomeric receptors formed by four subunits (GluR1-4), and GRIA4 encodes the fourth subunit, GluR4. (Rosenmund et al., Science 280(5369): 1596-9 (1998)). AMPAR mediate the majority of fast excitatory synaptic transmission in the brain and are thought to be involved in both learning and memory formation. (Gomes et al., Traffic. 8(3): 259-69 (2007)). AMPAR and psychiatric disease appear to be linked. Indeed, the AMPAR subunits GluR1 and GluR4, and the AMPAR binding protein GRIP, are upregulated in the dorsolateral prefrontal cortex of elderly schizophrenics. (Dracheva et al., J. Neurosci. Res. 79(6):868-78 (2005)). Moreover, chronic (30 days) administration of the antidepressant maprotiline increased GluR1, GluR2, and GluR3 in the mouse nucleus accumbens and dorsal striatum (Tan et al., Exp. Brain Res. 170(4):448-56 (2006)), and fluoxetine has been shown to increase the phosphorylation of GluR1. (Svenningsson et al., Proc. Natl. Acad. Sci. U.S.A 99(5):3182-7 (2002)). These studies suggest a link between AMPA receptors and antidepressants.

[0016] The Laminin alpha 4 gene (LAMA4), located on nuclear chromosome 6q21, encodes the laminin A chain. Laminin, a constituent of the basement membrane is composed of 3 non-identical chains (A, B1, and B2). Laminin, the phosphorylated form of cAMP response element binding protein (pCREB), and cell adhesion molecule L1 (CAM-L1) and all appear to play a role in neuronal plasticity. CREB can affect the regulation of CAM-L1 transcription (Crossin et al., Dev. Dyn. 218(2):260-79 (2000)) and the heterophilic binding of CAM-L1 and laminin initiates neuronal plasticity. (Hall et al., J. Neurochem. 75(1):336-46 (2000)). Moreover, laminin, pCREB, and CAM-L1 are modulated by stress and antidepressants (Laifenfeld et al., Neurobiol. Dis. 20(2):432-41 (2005)). Laminin, pCREB, and CAM-L1 were decreased in the rat hippocampus and frontal cortex following a 6 week exposure to chronic stress. (Id.). Conversely, chronic administration of the antidepressant desipramine to unstressed rats increased laminin and CAM-L1 in both the hippocampus and frontal cortex, and increased pCREB in the frontal cortex only. (Id.). In a human study decreased laminin was found in post-mortem cortex samples from depressed, bipolar, and schizophrenic patients and decreased CAM-L1 was found in cortical samples from depressed and schizophrenic patients (Laifenfeld et al., Biol. Psychiatry 57(7):716-25 (2005)). Moreover, the same study found cortical laminin and CAM-L1 levels were lower in unmedicated depressed subjects when compared to medicated depressed subjects or control subjects (Id.). These studies suggest that laminin, pCREB, and CAM-L1 may play roles in depression and the mode of antidepressant action.

[0017] Mitogen-activated protein kinase 1 (MAPK1 or ERK2), located on nuclear chromosome 22q11.2, is involved in MAPK signal transduction, a widely used signaling cascade. In a postmortem study of suicide subjects, MAPK1 activity and expression was significantly decreased in the hippocampus whereas no change was observed in the cerebellum when compared to non-psychiatric control subjects. (Dwivedi et al., J. Neurochem. 77(3):916-28 (2001)). In a more recent study, downstream targets of MAPK1, BDNF (brain-derived neurotrophic factor) and NTF3 (neurotrophin 3), were decreased in the hippocampus of depressed suicide vs. non-depressed/non-psychotic non-suicide subjects. (Karege et al., Brain Res. Mol. Brain Res. 136(1-2):29-37 (2005)). Conversely, antidepressants appear to have the opposite effect. Addition of the antidepressant fluoxetine to cultured rat astrocytes increased MAPK1 activation (Mercier et al., J. Mol. Neurosci. 24(2):207-16 (2004)), and the mood stabilizers lithium and valproate increase the activity of the MAPK pathway in rat hippocampus and frontal cortex (Einat et al., J. Neurosci. 23(19):7311-6 (2003)). These data suggest that antidepressant treatment may ameliorate depression-associated reduction in the activity of the MAPK pathway (Karege et al., supra (2005)).

[0018] The neuropeptide Y receptor Y1 (NPY1R), located on nuclear chromosome 4q31.2, is a receptor for neuropeptide Y (NPY), a 36-amino acid peptide widely distributed in the central and peripheral nervous system. In rat brain, NPY binding to NPY1R was strongly dependent on PLC (phospholipase C) activity and this binding could be inhibited by PLC inhibitors. (Parker et al., J. Pharmacol. Exp. Ther. 286(1):382-91 (1998)). Intracerebroventricular injection of NPY exerted dose dependent antidepressant-like effect in mice and this effect may act through 5-HT (serotonin) and NA (noradrenaline) neurotransmission. (Redrobe et al., Neuropsychopharmacol. 26(5):615-24 (2002)). NPY is co-localized with 5-HT-ergic and NA-ergic neurons and modulates the release of 5-HT and NA. (Finta et al., Naunyn. Schmiedebergs Arch. Pharmacol. 346(4):472-4 (1992); Martire et al., Eur. J. Pharmacol. 230(2):231-4 (1993); Schlicker et al., Naunyn. Schmiedebergs Arch. Pharmacol. 343(2):117-22 (1991)). Moreover, administration of NPY1R agonist increased levels of both 5-HT and NA in the rodent brain (Hastings et al., Brain Res. 750(1-2):301-4 (1997); Song et al., Brain Behav. Immun. 10(1):1-16 (1996)) and reduced anxiety. (Sorensen et al., J. Neurosci. Res. 77(5):723-9 (2004)). Several reports suggest NPY may be acting through NPY1R specifically to induce antidepressant-like effects. Indeed, NPY1R specific antagonists blocked the antidepressant effects of either intracerebroventricular NPY injection (Redrobe et al., Neuropsychopharmacol. 26(5): 615-24 (2002)) or hippocampal C3 region injection of NPY (Ishida et al., Hippocampus 17(4):271-80 (2007)). These studies suggest a link between depression and NPYR1.

[0019] Opioid receptor delta (OPRD1) is an endorphin receptor located on nuclear chromosome 1p36. Opioids affect biological function through three main types of opioid G protein-coupled receptors termed mu- (endorphins), delta- (enkephalinis) and kappa- (dynorphins). (Mansour et al., Trends Neurosci. 18(1):22-9 (1995)). In contrast to OPRM1 knockout mice, mice lacking OPRD1 exhibit increased locomotor activity, increased anxiety and increase depressive-like behaviors. (Filliol et al., Nat. Genet. 25(2):195-200 (2000)). Although no human studies linking OPRD1 and depression exist to our knowledge, polymorphisms in OPRD1 have been associated with substance abuse (Zhang, Mol. Psychiatry (electronic publ.) (2007)) suggesting a potential link with psychiatric function.

[0020] Opioid receptor mu (OPRM1) is an endorphin receptor located on nuclear chromosome 6q24. Opioids affect biological function through three main types of opioid G protein-coupled receptors termed mu- (endorphins), delta- (enkephalinis) and kappa- (dynorphins). (Mansour et al., supra (1995)). OPRM1-deficient mice exhibit decreased anxiety (Yoo et al., Synapse 54(2):72-82 (2004b)), less depressive-like behavior (Filliol et al., Nat. Genet. 25(2):195-200 (2000); Yoo et al., supra (2004)), and increased 5-HT_{1A} expression, suggesting a possible a compensatory mechanism for decreased opioid neurotransmission. (Yoo et al., supra (2004)). A recent human study demonstrated that decreased mu-opioid neurotransmission in healthy controls when instructed to think of events causing sadness (sad state). In contrast, female MDD patients under the same conditions exhibited increased mu-opioid system neurotransmission. (Kennedy et al., Arch. Gen. Psychiatry 63(11):1199-208 (2006)). Moreover, MDD patients who were subsequently shown to respond to a ten-week course of SSRI, exhibited increased mu-opioid activation during the sad state, whereas non-responders exhibited decreased activation. (Kennedy et al., supra (2006)). These data suggest OPRM1 may be over-activated in patients with MDD, particularly in patients responsive to SSRIs. (Kennedy et al., supra (2006)).

[0021] The PER3 encodes the homolog of Drosophila Period 3. It maps to chromosome 1p36.23 and consists of 18 exons. Period 3 is a clock gene involved in mammalian circadian rhythms, which have been shown to be disrupted in major depressive disorder. (Bunney et al., Neuropsychopharm. 22(4):335-45 (2000)). Polymorphisms, particularly 1940T>G (amino acid change V647G), in PER3 have been found to be associated with delayed sleep phase syndrome. (Ebisawa et al., EMBO Reports 2(4):342-6 (2001)). Polymorphisms in PER3 have been recently associated with response to SSRI treatment and circadian changes in mood symptoms (Artioli et al., Neuropsychopharm. 17(9):587-94 (2007)). Given the effect of these polymorphisms on sleep cycles and the role of sleep disturbances in major depression, it is rational that variants of PER3 may be associated with major depression or its treatment.

[0022] Phospholipase C-β1 (PLCB1), located on nuclear chromosome 20p12, generates 1,4,5-trisphosphate (IP3) and diacylglycerol (DAG) from phosphatidylinositol 4,5-bisphosphate (IP2). This conversion is key to the intracellular transduction of many extracellular signals. Various neurotransmitter receptors, such as the histamine H₁, serotonin 5-HT₂, α adrenergic and type 1 metabotropic glutamate receptors activate PLC-β1. (Cockcroft et al., Biochem. J. 288 (Pt. 1):1-14 (1992); Lucas et al., Trends Pharmacol. Sci. 16(7):246-52 (1995); Pin et al., Neuropharmacology 34(1): 1-26 (1995); Rhee et al., J. Biol. Chem. 267(18):12393-6 (1992)). PLC-β1 knockout mice exhibit schizophrenic-like behaviors (e.g., hyper-locomotion, deficient sensorimotor gating, reduced startle responses, etc.) that can be rescued by administration of the antipsychotics clozapine (McOmish et al., Mol. Psychiatry (electronic publ.) (2007)) or haloperidol. (Koh et al., Genes Brain Behav. 7(1):120-8 (2008)). In a study of post-mortem cortex from human suicide victims with depression, PLC-β1 expression was decreased compared to normal subjects (Pandey, Am. J. Psychiatry 156(12):1895-901 (1999)). Phospholipase therefore appears to be associated with psychiatric disease.

[0023] The PSMD1 gene encodes proteasome (prosome, macropain) 26S subunit, non-ATPase, 1. The gene consists of 25 exons and maps to chromosome 2q37.1. The 26S proteasome is a multicatalytic proteinase complex with a highly ordered structure composed of 2 complexes, a 20S core and a 19S regulator. Proteasomes are distributed throughout eukaryotic cells at a high concentration and cleave peptides in an ATP/ubiquitin-dependent process in a non-lysosomal pathway. An essential function of a modified proteasome, the immunoproteasome, is the processing of class I MHC peptides. This gene encodes the largest non-ATPase subunit of the 19S regulator lid, which is responsible for substrate recognition and binding.

[0024] Function of the 26S proteasome has been shown to be inhibited by prostaglandin J2 (PGJ2), an inflammatory by-product of the cyclooxygenase-2 pathway. (Wang et al., J. Biol. Chem. 281:21377-86 (2006)). A role of PGJ2 has been proposed in neurodegenerative disorders, which are characterized by aggregatation of ubiquitinated proteins due to lack of proteasome degradation. In addition, there is also a long history of research into the role of inflammation in psychiatric disorders including the Nobel Prize winning work of Julius Wagner-Jauregg in 1927. Specifically, cytokine hypersecretion has been associated with major depression. (Connor et al., Life Sci. 62:583-606 (1998)). Therefore, although not directly investigated to date, these observations suggest a potential role of PSMD1 in major depression and its treatment via an inflammatory mechanism not yet determined.

[0025] Within intron 16 of the PSMD1 gene, resides the HTR2B gene. The HTR2B gene codes the serotonin 5-HT2B receptor and consists of four exons. Le Coniat et al. mapped it to 2q36.3-q37.1 by fluorescence in situ hybridization (Genomics 32:172-73 (1996)).

[0026] Approximately fourteen receptor subtypes for serotonin have been identified that have various physiologic functions. (Barnes et al., Neuropharmacol. 38:1083-1152 (1991)). The 5-HT2 receptors mediate many of the central and peripheral physiologic functions of serotonin. Cardiovascular effects include contraction of blood vessels and shape changes in platelets; central nervous system effects include neuronal sensitization to tactile stimuli and mediation of hallucinogenic effects of phenylisopropylamine hallucinogens. (http://www.ncbi.nlm.nih.gov/entrez/dispomim.cgi?cmd=entry&id=601122).

[0027] Studies have identified polymorphisms in the HTR2B gene to be associated with drug abuse (Lin et al., Pharmacogenetics 14(12):805-11 (2004)) and early-onset obsessive compulsive disorder. (Kim et al., Mol. Cell. Probes 14(1):47-52 (2000)). 5-HT2B receptor activation leads to phosphorylation of the serotonin transporter thereby impairing its function as measured by decreased transport velocity and Na⁺, K⁺-ATPase activity (Launay et al., FASEB J. 20:1843-54 (2006)). Modulation of serotonin transporter function by the 5-HT2B receptor would suggest a potential role of this receptor subtype in mediating the effects of serotonin reuptake inhibitors. Moreover, 5-HT2B agonism can augment the anxiolytic-like properties of the SSRI antidepressant paroxetine. (Nic Dhonnchadha et al., Psychopharmacol. (Berl.) 179(2): 418-29 (2005)). Moreover, an oral melatonin MT1/MT2 agonist with 5-HT2B/5-HT2C antagonist activity is currently is currently being developed for the treatment of MDD (Dubocovich, Curr. Opin. Investig. Drugs 7(7):670-80 (2006)). Taken together, these studies suggest 5-HT2B plays a role in depression.

[0028] The Spectrin SH3 Domain-Binding Protein 1 (also known as ABL Interactor 1 (ABI1)) gene is found in nuclear chromosome 10p11.2. ABI1 contains SH3 and proline rich domains which are involved in binding to c-Ab1, a nonreceptor tyrosine kinase (NRTK) implicated in cell growth, apoptosis, and leukemia (c-Ab1 is often fused to BCR in many cases of myeloid leukemia). ABI1, normally highly expressed in the brain (Shi et al., Genes Dev. 9(21):2583-97 (1995)), is differentially post-translationally modified during CNS maturation. (Courtney et al., Mol. Cell. Neurosci. 16(3):244-57 (2000)). In addition, ABI1 has been linked to cytoskeletal reorganization through its interactions with Sos1 and Eps8, a substrate complex of receptor tyrosine kinases, such as EGFR (epidermal growth factor receptor). (Scita et al., Nature 401(6750):290-3 (1999)). Actin, a major component of dendritic spines (Fifkova et al., J. Cell. Biol. 95(1):345-50 (1982)), is involved in stable long term potentiation (Krucker et al., Proc. Natl. Acad. Sci. U.S.A 97(12):6856-61 (2000)), and dynamic rearrangements of the actin cytoskeleton are required for normal presynaptic function. (Kim et al., J. Neurosci. 19(11):4314-24 (1999)). It has therefore been suggested that c-Ab1, and its target ABI1 may play a role in neuronal development and plasticity. (Moresco et al., J. Neurophysiol. 89(3):1678-87 (2003)). Given that antidepressants may function by altering neuronal plasticity, ABI1 may be linked to antidepressant response.

[0029] LOC402382 is a predicted gene, similar to collagen, type I, alpha 2 (COL1A2)). Although there is no known function for this gene, the homolgous COLIA2 gene, normally expressed in the skin, tendon and bone (Savaraj et al., Cancer Invest. 23(7):577-81 (2005)), was found to be overexpressed in human medulloblastomas (Liang et al., J. Neurooncol. 86(2):133-41 (2007)). Medulloblastomas are malignant and invasive embryonal tumors that typically present in the cerebellum of children. By comparing medulloblastoma tissue to normal cerebellum via microarray, the authors observed an increase in COL1A2 expression in the tumor (Liang et al., supra (2007)). Moreover, they hypothesize a receptor for type 1 collagen, the β1 subunit of integrin, may be incorrectly signaling due to the overexpression of COL1A2 and that this signaling is misregulating cell survival and proliferation (Liang et al., supra (2007)). Although a link between LOC402382 and depression/antidepressants remains to be found, the homologous gene, COLIA2, has been found to be misregulated in the pathogenenic brain.

[0030] The neurocalcin delta (NCALD) gene, found on nuclear chromosome 8q22.2, encodes a member of the EF-hand calcium-binding protein superfamily. NCALD, predominantly expressed in retinal photoreceptors and neurons, (Wang et al., Biochim. Biophys. Acta 1518(1-2):162-7 (2001)), contains two pairs of EF-hand calcium-binding loop sequences and a N-terminal myristoylation signal. (Vijay-Kumar et al., Nat. Struct. Biol. 6(1):80-8 (1999)). Although the cellular function of NCALD is largely unknown, it has been suggested to regulate cGMP levels via a direct interaction with membrane bound guanylyl cyclase. (Duda et al., Mol. Cell Biochem. 267(1-2):107-22 (2004); Krishnan et al., Biochemistry 43(10):2708-23 (2004)). Moreover, NCALD may play a role in neurotransmitter release since it is know to bind clathrin-coated vesicles. (Ivings et al., Biochem. J. 363(Pt. 3):599-608 (2002)). Although polymorphisms in NCALD have been associated with susceptibility of diabetic nephropathy (Kamiyama et al., Hum. Genet. 122(3-4):397-407 (2007)), and decreased NCALD is found the prefrontal cortex of a rat model of schizophrenia (Vercauteren et al., Proteomics 7(19): 3569-79 (2007)), no direct associations have been made between depression and NCALD. However, given the association between NCALD and neurotransmitter release, it is plausible to consider that a link between NCALD and depression/antidepressant action may exist.

### SUMMARY OF THE INVENTION

[0031] Accordingly, the inventors herein have discovered markers in the ACE, ATP5C3, BCL2L1, CYP2C9, DRD3, FOS, DTNBP1, GABRG3, GRIA4, LAMA4, MAPK1, NPY1R, OPRD1, OPRM1, PER3, PLCB1, PSMD1, ABI1, LOC402382, and NCALD genes, that are associated with response to antidepressants. These markers have a variety of pharmacogenetic research and clinical applications.

[0032] In a first aspect, the invention provides a method for predicting whether an individual will respond to an antidepressant comprising determining the presence or absence in the individual of a ACE, ATP5C3, BCL2L1, CYP2C9, DRD3, FOS, DTNBP1, GABRG3, GRIA4, LAMA4, MAPK1, NPY1R, OPRD1, OPRM1, PER3, PLCB1, PSMD1, ABI1, LOC402382, or NCALD marker, and making a prediction based on the results, wherein if the marker is present, then the prediction is that the individual is likely to respond to the antidepressant and if the marker is absent, the prediction is that the individual is not likely to respond to antidepressant.

[0033] In another aspect, the invention provides a method for treating depression in an individual comprising determining the presence or absence in the individual of a ACE, ATP5C3, BCL2L1, CYP2C9, DRD3, FOS, DTNBP1, GABRG3, GRIA4, LAMA4, MAPK1, NPY1R, OPRD1, OPRM1, PER3, PLCB1, PSMD1, ABI1, LOC402382, or NCALD marker, and making a treatment decision based on the results, wherein if the marker is present, then the decision is to prescribe to the individual the lowest approved dose of an antidepressant, and if the marker is absent, then the decision is to either prescribe to the individual the antidepressant at a dose that is higher than the lowest approved dose, or prescribe to the individual a therapy not including the antidepressant that is effective in treating depression.

[0034] In another aspect, the invention provides a kit for detecting a ACE, ATP5C3, BCL2L1, CYP2C9, DRD3, FOS, DTNBP1, GABRG3, GRIA4, LAMA4, MAPK1, NPY1R, OPRD1, OPRM1, PER3, PLCB1, PSMD1, ABI1, LOC402382, or NCALD marker comprising a set of one or more oligonucleotides designed for identifying each of the alleles at each polymorphic site in the ACE, ATP5C3, BCL2L1, CYP2C9, DRD3, FOS, DTNBP1, GABRG3, GRIA4, LAMA4, MAPK1, NPY1R, OPRD1, OPRM1, PER3, PLCB1, PSMD1, ABI1, LOC402382, or NCALD marker.

### Sequence Listings

[0035] SEQ ID NO:1 illustrates a reference sequence for the ACE gene.

[0036] SEQ ID NO:2 illustrates a reference sequence for the ATP5C3 gene.

[0037] SEQ ID NO:3 illustrates a reference sequence for the BCL2L1 gene.

[0038] SEQ ID NO:4 illustrates a reference sequence for the CYP2C9 gene.

[0039] SEQ ID NO:5 illustrates a reference sequence for the DRD3 gene.

[0040] SEQ ID NO:6 illustrates a reference sequence for the FOS gene.

[0041] SEQ ID NO:7 illustrates a reference sequence for the DTNBP1 gene.

[0042] SEQ ID NO:8 illustrates a reference sequence for the GABRG3 gene.

[0043] SEQ ID NO:9 illustrates a reference sequence for the GRIA4 gene.

[0044] SEQ ID NO:10 illustrates a reference sequence for the LAMA4 gene.

[0045] SEQ ID NO:11 illustrates a reference sequence for the MAPK1 gene.

[0046] SEQ ID NO:12 illustrates a reference sequence for the NPY1R gene.

[0047] SEQ ID NO:13 illustrates a reference sequence for the OPRD1 gene.

[0048] SEQ ID NO:14 illustrates a reference sequence for the OPRM1 gene.

[0049] SEQ ID NO:15 illustrates a reference sequence for the PER3 gene.

[0050] SEQ ID NO:16 illustrates a reference sequence for the PLCB1 gene.

[0051] SEQ ID NO:17 illustrates a reference sequence for the PSMD1 gene.

[0052] SEQ ID NOs:18-20 each illustrate a reference sequence for the ABI1 gene.

[0053] SEQ ID NO:21 illustrates a reference sequence for the LOC402382 gene.

[0054] SEQ ID NO:22 illustrates a reference sequence for the NCALD gene.

### DETAILED DESCRIPTION OF THE INVENTION

### I. Definitions

[0055] So that the invention may be more readily understood, certain terms are first defined.

[0056] As used in the specification and the claims, “a” or “an” means one or more unless explicitly stated otherwise. As used herein, “another” means at least a second or more.

[0057] Throughout this specification, the word “comprise” or variations such as “comprises” or “comprising” will be understood to imply the inclusion of a stated integer or groups of integers but not the exclusion of any other integer or group of integers.

[0058] “Allele” is a particular form of a gene or other genetic locus, distinguished from other forms by its particular nucleotide sequence, the term allele also includes one of the alternative polymorphisms (e.g., a SNP) found at a polymorphic site. In some contexts, it will be readily apparent to the skilled artisan that the term allele refers to the form of a locus that is present on a single chromosome in a somatic cell obtained from an individual; if the locus is on an autosomal chromosome, then the somatic cell in the individual will normally have two alleles for the locus. If these alleles have identical sequences, the individual is homozygous for that locus, and if the two alleles have different sequences, then the individual is heterozygous for the locus. If the locus is on a sex chromosome, then somatic cells from female individuals normally have two alleles, which may have the same or different sequences, while somatic cells from male individuals normally only has one allele for the locus.

[0059] “Antidepressant” is intended to refer to any drug useful in treating depression. It can include an SSRI such as vilazodone, fluoxetine, paroxetine, escitalopram, citalopram, and sertraline; a serotonin-norepinephrine reuptake inhibitor (SNRI) such as mirtazapine; a norepinephrine (noradrenaline) reuptake inhibitor (NRI) such as reboxetine; a norepinephrine-dopamine reuptake inhibitor such as bupropion; a tricyclic antidepressant (TCA) such as amitriptyline and desipramine; and a monoamine oxidase inhibitor (MAOI) such as phenelzine moclobemide selegiline.

[0060] “Disease” refers to an interruption, cessation, or disorder of one or more body functions, structures, systems or organs.

[0061] “Drug” includes any therapeutic or prophylactic compound, substance or agent including, without limitation, a small molecule, protein, vaccine, antibody or nucleic acid. In the description herein of some embodiments of the invention, it will be evident to the skilled artisan that the term drug can include a pharmaceutical composition or drug product comprising a therapeutic or prophylactic compound, substance or agent.

[0062] “Gene” is a segment of DNA that contains the coding sequence for a protein, wherein the segment may include promoters, exons, introns, and other untranslated regions that control expression.

[0063] “Marker” in the context of the present invention is a specific copy number of a specific polymorphism of the ACE, ATP5C3, BCL2L1, CYP2C9, DRD3, FOS, DTNBP1, GABRG3, GRIA4, LAMA4, MAPK1, NPY1R, OPRD1, OPRM1, PER3, PLCB1, PSMD1, ABI1, LOC402382, or NCALD genes that is associated with response to antidepressants. Preferred ACE, ATP5C3, BCL2L1, CYP2C9, DRD3, FOS, DTNBP1, GABRG3, GRIA4, LAMA4, MAPK1, NPY1R, OPRD1, OPRM1, PER3, PLCB1, PSMD1, ABI1, LOC402382, or NCALD markers are those shown in Tables A-1 through A-20, respectively (Appendix A), as well as genetic markers that are highly correlated with any marker in Tables A-1 through A-20, respectively (Appendix A) and/or are replaced by the same copy number of a substitute polymorphism, each of which is referred to herein as an alternate genetic marker. A substitute polymorphism comprises a sequence that is similar to that of any of the markers shown in Tables A-1 through A-20 (Appendix A), but in which the allele at one or more of the specifically identified polymorphic sites in that marker has been substituted with the allele at a different polymorphic site, whose substituting allele is in high linkage disequilibrium (LD) with the allele at the specifically identified polymorphic site. A linked polymorphism is any type of polymorphism, including a haplotype, which is in high LD with any one of the markers shown in Tables A-1 through A-20 (Appendix A). Two particular alleles at different loci on the same chromosome are said to be in LD if the presence of one of the alleles at one locus tends to predict the presence of the other allele at the other locus. Alternate genetic markers, which are further described below, may comprise types of variations other than SNPs, such as indels, RFLPs, repeats, etc.

[0064] “Genotype” is an unphased 5′ to 3′ sequence of the two alleles, typically a nucleotide pair, found at a set of one or more polymorphic sites in a locus on a pair of homologous chromosomes in an individual.

[0065] “Genotyping” is a process for determining a genotype of an individual.

[0066] “Haplotype pair” refers to the two haplotypes found for a locus in a single individual.

[0067] “Haplotyping” refers to any process for determining one or more haplotypes in an individual, including the haplotype pair for a particular set of PS, and includes use of family pedigrees, molecular techniques and/or statistical inference.

[0068] “Isolated” is typically used to reflect the purification status of a biological molecule such as RNA, DNA, oligonucleotide, or protein, and in such context means the molecule is substantially free of other biological molecules such as nucleic acids, proteins, lipids, carbohydrates, or other material such as cellular debris and growth media. Generally, the term “isolated” is not intended to refer to a complete absence of such material or to an absence of water, buffers, or salts, unless they are present in amounts that substantially interfere with the methods of the present invention.

[0069] “Locus” refers to a location on a chromosome or DNA molecule corresponding to a gene, a physical feature such as a polymorphic site, or a location associated with a phenotypic feature.

[0070] “Nucleotide pair” is the set of two nucleotides (which may be the same or different) found at a polymorphic site on the two copies of a chromosome from an individual.

[0071] “Oligonucleotide” refers to a nucleic acid that is usually between 5 and 100 contiguous bases in length, and most frequently between 10-50, 10-40, 10-30, 10-25, 10-20, 15-50, 15-40, 15-30, 15-25, 15-20, 20-50, 20-40, 20-30 or 20-25 contiguous bases in length. The sequence of an oligonucleotide can be designed to specifically hybridize to any of the allelic forms of a locus; such oligonucleotides are referred to as allele-specific probes. If the locus is a PS comprising a SNP, the complementary allele for that SNP can occur at any position within an allele-specific probe. Other oligonucleotides useful in practicing the invention specifically hybridize to a target region adjacent to a PS with their 3′ terminus located one to less than or equal to about 10 nucleotides from the PS, preferably ≦about 5 nucleotides. Such oligonucleotides hybridizing adjacent to a PS are useful in polymerase-mediated primer extension methods and are referred to herein as “primer-extension oligonucleotides.” In a preferred embodiment, the 3′-terminus of a primer-extension oligonucleotide is a deoxynucleotide complementary to the nucleotide located immediately adjacent to the PS.

[0072] “Phased sequence” refers to the combination of nucleotides present on a single chromosome at a set of polymorphic sites, in contrast to an unphased sequence, which is typically used to refer to the sequence of nucleotide pairs found at the same set of PS in both chromosomes.

[0073] “Polymorphic site” or “PS” refers to the position in a genetic locus or gene at which a SNP or other nonhaplotype polymorphism occurs. A PS is usually preceded by and followed by highly conserved sequences in the population of interest and thus the location of a PS is typically made in reference to a consensus nucleic acid sequence of thirty to sixty nucleotides that bracket the PS, which in the case of a SNP polymorphism is sometimes referred to as a context sequence for the SNP. The location of the PS may also be identified by its location in a consensus or reference sequence relative to the initiation codon (ATG) for protein translation. The skilled artisan understands that the location of a particular PS may not occur at precisely the same position in a reference or context sequence in each individual in a population of interest due to the presence of one or more insertions or deletions in that individual as compared to the consensus or reference sequence. Moreover, it is routine for the skilled artisan to design robust, specific and accurate assays for detecting the alternative alleles at a polymorphic site in any given individual, when the skilled artisan is provided with the identity of the alternative alleles at the PS to be detected and one or both of a reference sequence or context sequence in which the PS occurs. Thus, the skilled artisan will understand that specifying the location of any PS described herein by reference to a particular position in a reference or context sequence (or with respect to an initiation codon in such a sequence) is merely for convenience and that any specifically enumerated nucleotide position literally includes whatever nucleotide position the same PS is actually located at in the same locus in any individual being tested for the presence or absence of a genetic marker of the invention using any of the genotyping methods described herein or other genotyping methods well-known in the art.

[0074] “Polymorphism” refers to one of two or more genetically determined alternative sequences or alleles that occur for a gene or a genetic locus in a population. As used herein, the term polymorphism includes, but is not limited to (a) a sequence of as few as one nucleotide that occurs at a polymorphic site (as defined above), which is also referred to herein as a single nucleotide polymorphism (SNP) and (b) a sequence of nucleotides that occur on a single chromosome at a set of two or more polymorphic sites in the gene or genetic locus of interest, which is also referred to herein as a haplotype. The different alleles of a polymorphism typically occur in a population at different frequencies, with the allele occurring most frequently in a selected population sometimes referenced as the “major” or “wildtype” allele. Diploid organisms may be homozygous or heterozygous for the different alleles that exist. A biallelic polymorphism has two alleles, and the minor allele may occur at any frequency greater than zero and less than 50% in a selected population, including frequencies of between 1% and 2%, 2% and 10%, 10% and 20%, 20% and 30%, etc. A triallelic polymorphism has three alleles. In addition to SNPs and haplotypes, examples of polymorphisms include restriction fragment length polymorphisms (RFLPs), variable number of tandem repeats (VNTRs), dinucleotide repeats, trinucleotide repeats, tetranucleotide repeats, simple sequence repeats, insertion elements such as Alu, and deletions of one or more nucleotides.

[0075] “Treat” means to administer a drug internally or externally to a patient having one or more disease symptoms for which the drug has known therapeutic activity. Typically, the drug is administered in an amount effective to alleviate one or more disease symptoms in the treated patient or population, whether by inducing the regression of or inhibiting the progression of such symptom(s) by any clinically measurable degree. The amount of a drug that is effective to alleviate any particular disease symptom (also referred to as the “therapeutically effective amount”) may vary according to factors such as the disease state, age, and weight of the patient, and the ability of the drug to elicit a desired response in the patient. Whether a disease symptom has been alleviated can be assessed by any clinical measurement typically used by physicians or other skilled healthcare providers to assess the severity or progression status of that symptom. While an embodiment of the present invention (e.g., a treatment method or article of manufacture) may not be effective in alleviating the target disease symptom(s) in every patient, it should alleviate the target disease symptom(s) in a statistically significant number of patients as determined by any statistical test known in the art such as the Student's t-test, the chi²-test, the U-test according to Mann and Whitney, the Kruskal-Wallis test (H-test), Jonckheere-Terpstra-test and the Wilcoxon-test.

[0076] “Antidepressant response” or “respond to an antidepressant” or “response to an antidepressant” is intended to refer to the change in an individual's depressive symptoms following antidepressant treatment/administration, preferably as measured by change in the score on any of the Montgomery-Asberg Depression Rating Scale (MADRS) (Montgomery et al., Br. J. Psychiatry 134:382-9 (1979)), all 21 items of the Hamilton Depression Rating Scale (HAM-D-21) (Hamilton, J. Neurol. Neurosurg. Psychiat. 23:56-61 (1960)), the first 17 items of the Hamilton Depression Rating Scale (HAM-D-17) (Id.), the Hamilton Anxiety Scale (HAM-A) (Hamilton, Br. J. Med. Psychol. 32(1):50-5 (1959)), and the Clinical Global Impression Improvement scale (CGI-I). (NATIONAL INSTITUTE OF MENTAL HEALTH, Ecdeu, ed. (1976)). The MADRS is an observer rating scale that has proven to be an efficient and practical measure of depression that is sensitive to treatment effects. The HAM-D-21 is a 21-item Likert scale used for the rating of depressive symptom severity in patients who have already been confirmed as meeting this diagnosis. Its psychometric properties are well understood and correlations between score and level of symptom severity are documented. The HAM-D-17 is an assessment of the first 17 items from the 21-item scale. The CGI-I measures change from the baseline state at every subsequent visit providing a global evaluation of the patient's improvement over time. The HAM-A is a 14-item rating scale developed to quantify the severity of anxiety.

[0077] With regard to all these depression rating scales, the lower the score, the lower the presence of depressive symptoms. Thus, a greater downward change in any of these rating scales following antidepressant treatment/administration when compared to patients given the antidepressant or a placebo indicates a “good” or “positive” or “better” response to the antidepressant (or, simply, “response”).

### II. Composition and Phenotypic Effect of Markers of Antidepressant Response

[0078] As described above and in the examples below, genetic markers according to the present invention are associated with response to antidepressants, and are referred to herein as ACE, ATP5C3, BCL2L1, CYP2C9, DRD3, FOS, DTNBP1, GABRG3, GRIA4, LAMA4, MAPK1, NPY1R, OPRD1, OPRM1, PER3, PLCB1, PSMD1, ABI1, LOC402382, or NCALD markers. Each marker of the invention is a combination of a particular polymorphism associated with the antidepressant response and a copy number of that polymorphism. Preferably, the polymorphism is one of the markers shown in Appendix A, each of which contains a sequence for a specific set of PSs in the ACE, ATP5C3, BCL2L1, CYP2C9, DRD3, FOS, DTNBP1, GABRG3, GRIA4, LAMA4, MAPK1, NPY1R, OPRD1, OPRM1, PER3, PLCB1, PSMD1, ABI1, LOC402382, or NCALD genes. The locations of these marker PSs in the ACE, ATP5C3, BCL2L1, CYP2C9, DRD3, FOS, DTNBP1, GABRG3, GRIA4, LAMA4, MAPK1, NPY1R, OPRD1, OPRM1, PER3, PLCB1, PSMD1, ABI1, LOC402382, and NCALD genes are at positions corresponding to those identified in Tables A-21 through A-40 in Appendix A. In describing the PSs in the markers of the invention, reference is made to the sense strand of a gene for convenience. However, as recognized by the skilled artisan, nucleic acid molecules containing a particular gene may be complementary double stranded molecules and thus reference to a particular site on the sense strand refers as well to the corresponding site on the complementary antisense strand.

[0079] As described in more detail in the examples below, the genetic markers of the invention are based on the discovery by the inventors of associations between particular copy numbers of certain polymorphisms in the ACE, ATP5C3, BCL2L1, CYP2C9, DRD3, FOS, DTNBP1, GABRG3, GRIA4, LAMA4, MAPK1, NPY1R, OPRD1, OPRM1, PER3, PLCB1, PSMD1, ABI1, LOC402382, and NCALD genes and antidepressant response. Individuals having the copy number indicated for each of the polymorphisms shown in Appendix A were more likely to respond to an antidepressant relative to individuals having other copy numbers of those polymorphisms. Moreover, as shown in Tables 1-20 below, the association between the presence of these genetic markers and response to antidepressants is statistically significant.

[0080] In addition, the skilled artisan will appreciate that all of the embodiments of the invention described herein may frequently be practiced using an alternate genetic marker for any of the genetic markers in Tables A-1 through A-20 (Appendix A). Alternate genetic markers are readily identified by determining the degree of linkage disequilibrium (LD) or the degree of correlation between an allele at a PS in any of Tables A-1 through A-20 (Appendix A) and a candidate substituting allele at a polymorphic site located elsewhere in the relevant gene or on the relevant chromosome. Similarly, alternate genetic markers comprising a linked polymorphism are readily identified by determining the degree of LD between a marker in any of Tables A-1 through A-20 (Appendix A) and a candidate linked polymorphism located elsewhere in the relevant gene or on the relevant chromosome. The candidate substituting allele or linked polymorphism may be a polymorphism that is currently known. Other candidate substituting alleles and linked polymorphisms may be readily identified by the skilled artisan using any technique well-known in the art for discovering polymorphisms.

[0081] The degree of LD between a genetic marker in any of Tables A-1 through A-20 (Appendix A) and a candidate alternate polymorphism may be determined using any LD measurement known in the art. LD patterns in genomic regions are readily determined empirically in appropriately chosen samples using various techniques known in the art for determining whether any two alleles (e.g., between SNPs at different PSs or between two haplotypes) are in linkage disequilibrium. (GENETIC DATA ANALYSIS II, Weir, Sinauer Associates, Inc., Sunderland, Mass. (1996)). The skilled artisan may readily select which method of determining LD will be best suited for a particular sample size and genomic region.

[0082] One of the most frequently used measures of linkage disequilibrium is Δ², which is calculated using the formula described by Devlin et al. (Genomics 29(2):311-22 (1995)). Δ² is the measure of how well an allele X at a first locus predicts the occurrence of an allele Y at a second locus on the same chromosome. The measure only reaches 1.0 when the prediction is perfect (e.g., X if and only if Y).

[0083] In preferred alternate genetic markers, the locus of a substituting allele or a linked polymorphism is in a genomic region of about 100 kilobases spanning the relevant gene, and more preferably, the locus is in the relevant gene. Other preferred alternate genetic markers are those in which the LD or correlation between the relevant alleles (e.g., between the substituting SNP and the substituted SNP, or between the linked polymorphism and the haplotype) has a Δ² or r² (the square of correlation coefficient) value, as measured in a suitable reference population, of at least 0.75, more preferably at least 0.80, even more preferably at least 0.85 or at least 0.90, yet more preferably at least 0.95, and most preferably 1.0. The reference population used for this Δ² or r² measurement preferably reflects the genetic diversity of the population of patients that are candidates for treatment with antidepressants. For example, the reference population may be the general population, a population using the drug, a population diagnosed with a particular condition for which the drug shows efficacy, or a population of similar ethnic background.

[0084] Individuals having any of the genetic markers described herein are likely to respond to antidepressants. Preferred genetic markers of the invention comprise any of the markers in Tables A-1 through A-20 (Appendix A).

### III. Detecting Markers of Antidepressant Response

[0085] In all of the embodiments of the invention, the skilled artisan will appreciate that detecting the presence or absence of a specific genetic marker in a marker group in an individual is also literally equivalent to detecting the presence or absence of the same copy number of a substitute, linked or correlated polymorphism for the polymorphism in that specific marker in which Δ²=1 for the linkage disequilibrium or the correlation coefficient=1 between the substituted polymorphism in that marker and the substituting polymorphism.

[0086] The presence in an individual of a genetic marker of the invention may be determined by any of a variety of methods well known in the art that permits the determination of whether the individual has the required copy number of the polymorphism comprising the marker. For example, if the required copy number is one or two, then the method need only determine that the individual has at least one copy of the polymorphism. In preferred embodiments, the method provides a determination of the actual copy number.

[0087] Typically, these methods involve assaying a nucleic acid sample prepared from a biological sample obtained from the individual to determine the identity of a nucleotide or nucleotide pair present at one or more polymorphic sites in the marker. Nucleic acid samples may be prepared from virtually any biological sample. For example, convenient samples include whole blood, serum, semen, saliva, tears, fecal matter, urine, sweat, buccal matter, skin and hair. Preferred samples contain only somatic cells, and such samples would typically be required when the locus is on an autosomal or X chromosome. Nucleic acid samples may be prepared for analysis using any technique known to those skilled in the art. Preferably, such techniques result in the production of genomic DNA sufficiently pure for determining the genotype or haplotype pair for a desired set of polymorphic sites in the nucleic acid molecule. Such techniques may be found, for example, in MOLECULAR CLONING: A LABORATORY MANUAL, Sambrook et al., Cold Spring Harbor Laboratory, New York (2001), which is incorporated herein by reference.

[0088] For markers in which the specified polymorphism is a haplotype, the copy number of the haplotype in the nucleic acid sample may be determined by a direct haplotyping method or by an indirect haplotyping method, in which the haplotype pair for the set of polymorphic sites comprising the marker is inferred from the individual's haplotype genotype for that set of PSs. The way the nucleic acid sample is prepared depends on whether a direct or indirect haplotyping method is used.

[0089] Direct haplotyping methods typically involve treating a genomic DNA sample isolated from a blood or cheek sample obtained from the individual in a manner that produces a hemizygous DNA sample that contains only one of the individual's two alleles for the locus which, as readily understood by the skilled artisan, may be the same allele or different alleles, and detecting the nucleotide present at each PS of interest. The nucleic acid sample may be obtained using a variety of methods known in the art for preparing hemizygous DNA samples, which include: targeted in vivo cloning (TIVC) in yeast as described in WO 98/01573, U.S. Pat. Nos. 5,866,404 and 5,972,614; generating hemizygous DNA targets using an allele specific oligonucleotide in combination with primer extension and exonuclease degradation as described in U.S. Pat. No. 5,972,614; single molecule dilution (SMD) as described in Ruaño et al., Proc. Natl. Acad. Sci. U.S.A. 87:6296-300 (1990); and allele specific PCR (Ruaño et al., Nucl. Acids Res. 17:8392 (1989); Ruaño et al., Nucl. Acids Res. 19:6877-82 (1991); Michalatos-Beloin et al., infra (1996)).

[0090] As will be readily appreciated by those skilled in the art, if the individual is expected to have two alleles for the locus (e.g., the locus is on an autosomal chromosome, or the locus is on the X chromosome and the individual is a female), any individual clone of the locus in that individual will permit directly determining the haplotype for only one of the two alleles; thus, additional clones will need to be examined to directly determine the identity of the haplotype for the other allele. Typically, at least five clones of the genomic locus present in the individual should be examined to have more than a 90% probability of determining both alleles. In some cases, however, once the haplotype for one allele is directly determined, the haplotype for the other allele may be inferred if the individual has a known genotype for the PSs comprising the marker or if the frequency of haplotypes or haplotype pairs for the locus in an appropriate reference population is available.

[0091] Direct haplotyping of both alleles may be performed by assaying two hemizygous DNA samples, one for each allele, that are placed in separate containers. Alternatively, the two hemizygous samples may be assayed in the same container if the two samples are labeled with different tags, or if the assay results for each sample are otherwise separately distinguishable or identifiable. For example, if the samples are labeled with first and second fluorescent dyes, and a PS in the locus is assayed using an oligonucleotide probe that is specific for one of the alleles—and labeled with a third fluorescent dye, then detecting a combination of the first and third dyes would identify the nucleotide present at the PS in the first sample while detecting a combination of the second and third dyes would identify the nucleotide present at the PS in the second sample.

[0092] Indirect haplotyping methods typically involve preparing a genomic DNA sample isolated from a blood or cheek sample obtained from the individual in a manner that permits accurately determining the individual's genotype for each PS in the locus. The genotype is then used to infer the identity of at least one of the individual's haplotypes for the locus, and preferably used to infer the identity of the individual's haplotype pair for the locus.

[0093] In one indirect haplotyping method, the presence of zero, one or two copies of a haplotype of interest can be determined by comparing the individual's genotype for the PS in the marker with a set of reference haplotype pairs for the same set of PS and assigning to the individual a reference haplotype pair that is most likely to exist in the individual. The individual's copy number for the haplotype comprising the marker is how many copies of that haplotype is in the assigned reference haplotype pair.

[0094] The reference haplotype pairs are those that are known to exist in the general population or in a reference population, or that are theoretically possible based on the alternative alleles possible at each PS. The reference population may be composed of randomly-selected individuals representing the major ethnogeographic groups of the world. A preferred reference population is one having a similar ethnogeographic background as the individual being tested for the presence of the marker. The size of the reference population is chosen based on how rare a haplotype is that one wants to be guaranteed to see. For example, if one wants to have a q% chance of not missing a haplotype that exists in the population at a p% frequency of occurring in the reference population, the number of individuals (n) who must be sampled is given by 2n=log(1−q)/log(1−p) where p and q are expressed as fractions. A particularly preferred reference population includes one or more 3-generation families to serve as a control for checking quality of haplotyping procedures. If the reference population comprises more than one ethnogeographic group, the frequency data for each group is examined to determine whether it is consistent with Hardy-Weinberg equilibrium. Hardy-Weinberg equilibrium (D. L. Hartl et al., Principles of Population Genomics, Sinauer Associates (Sunderland, Mass.), 3^{rd} Ed., 1997) postulates that the frequency of finding the haplotype pair H₁/H₂ is equal to p_{H-W}(H₁/H₂)=2p(H₁)p(H₂) if H₁≠H₂ and p_{H-W}(H₁/H₂)=p(H₁)p(H₂) if H₁=H₂. A statistically significant difference between the observed and expected haplotype frequencies could be due to one or more factors including significant inbreeding in the population group, strong selective pressure on the gene, sampling bias, and/or errors in the genotyping process. If large deviations from Hardy-Weinberg equilibrium are observed in an ethnogeographic group, the number of individuals in that group can be increased to see if the deviation is due to a sampling bias. If a larger sample size does not reduce the difference between observed and expected haplotype pair frequencies, then one may wish to consider haplotyping the individual using a direct haplotyping method such as, for example, the method disclosed in U.S. Pat. No. 5,866,404, single molecule dilution, or allele-specific long-range PCR. (Michalotos-Beloin et al., Nucleic Acids Res. 24:4841-4843 (1996)).

[0095] Assignment of the haplotype pair may be performed by choosing a reference haplotype pair that is consistent with the individual's genotype. When the genotype of the individual is consistent with more than one reference haplotype pair, the frequencies of the reference haplotype pairs may be used to determine which of these consistent haplotype pairs is most likely to be present in the individual. If a particular consistent haplotype pair is more frequent in the reference population than other consistent haplotype pairs, then the consistent haplotype pair with the highest frequency is the most likely to be present in the individual. Occasionally, only one haplotype represented in the reference haplotype pairs is consistent with any of the possible haplotype pairs that could explain the individual's genotype, and in such cases the individual is assigned a haplotype pair containing this known haplotype and a new haplotype derived by subtracting the known haplotype from the possible haplotype pair. In rare cases, either no haplotypes in the reference population are consistent with the individual's genotype, or alternatively, multiple reference haplotype pairs are consistent with the genotype. In such cases, the individual is preferably haplotyped using a direct molecular haplotyping method.

[0096] Indirect determination of the copy number of haplotypes present in an individual from her genotype is illustrated here for a hypothetical Marker X, which is associated with antidepressant response. Marker X consists of one or two copies of Haplotype GA, which contains two polymorphic sites, PSA and PSB, in Gene Y on an autosomal chromosome. The hypothetical below shows the 9 (3ⁿ, where each of n=2 bi-allelic polymorphic sites may have one of 3 different genotypes present) genotypes that may be detected for the set of PSA and PSB, using a genomic DNA sample from an individual. Eight of the nine possible genotypes for the two sites allow unambiguous determination of the number of copies of Haplotype GA present in the individual and therefore would allow unambiguous determination of the presence or absence in the individual of Marker X. However, an individual with the C/G A/C genotype could possess either of the following haplotype pairs: CA/GC or CC/GA, and thus could have either 1 copy of Haplotype GA (CC/GA haplotype pair), which would mean Marker X is present, or 0 copy (CA/GC haplotype pair) of Haplotype GA, which would mean Marker X is absent. For this instance where there is ambiguity in the haplotype pair underlying the determined genotype C/G A/C, frequency information may be used to determine the most probable haplotype pair and therefore the most likely number of copies of the marker haplotype in the individual, as described above. Alternatively, for the ambiguous double heterozygote, genotyping of one or more additional sites in Gene Y or nearby may be performed to resolve this ambiguity. The skilled artisan would recognize that these one or more additional sites would need to have sufficient linkage with the alleles in at least one of the haplotypes in a possible haplotype pair to permit unambiguous assignment of that haplotype pair. Although this illustration has been directed to the particular instance of determining the number of Haplotype AG present in an individual, an analogous process would be used for determining the copy number of any linked or substitute haplotype for Haplotype AG.

Hypothetical: Possible copy numbers of Haplotype (GA)
Derived From Possible Genotypes at PSA and PSB

| | |
|---|---|
| Genotype | Copy Number of |

| PSA | PSB | Haplotype GA |
|---|---|---|
| G/G | C/C | 0 |
| G/G | A/C | 1 |
| C/G | C/C | 0 |
| C/G | A/C | 1 or 0 |
| G/C | A/A | 1 |
| G/G | A/A | 2 |
| C/C | A/A | 0 |
| C/C | A/C | 0 |
| C/C | C/C | 0 |

[0097] Any of all of the steps in the indirect haplotyping method described above may be performed manually, by visual inspection and performing appropriate calculations, but are preferably performed by a computer-implemented algorithm that accesses data on the individual's genotype and reference haplotype pairs stored in computer readable format. Such algorithms are described in WO 01/80156 and WO 05/048012. Alternatively, the haplotype pair in an individual may be predicted from the individual's genotype for that gene with the assistance of other reported haplotyping algorithms (See, e.g., Clark et al., Mol. Bio. Evol. 7:111-22 (1990); Stephens et al., Am. J. Hum. Genet. 68:978-89 (2001); WO 02/064617; Niu et al., Am. J. Hum. Genet. 70:157-69 (2002); Zhang et al., BMC Bioinformatics 4(1):3 (2003)) or through a commercial haplotyping service.

[0098] All direct and indirect haplotyping methods described herein typically involve determining the identity of at least one of the alleles at a PS in a nucleic acid sample obtained from the individual. To enhance the sensitivity and specificity of that determination, it is frequently desirable to amplify from the nucleic acid sample one or more target regions in the locus. An amplified target region may span the locus of interest, such as an entire gene, or a region thereof containing one or more polymorphic sites. Separate target regions may be amplified for each PS in a marker.

[0099] Any amplification technique known to those of skill in the art may be used in practicing the present invention including, but not limited to, polymerase chain reaction (PCR) techniques. PCR may be carried out using materials and methods known to those of skill in the art. (See generally PCR TECHNOLOGY: PRINCIPALS AND APPLICATIONS FOR DNA AMPLIFICATION, ed. Erlich, Freeman Press, New York (1992); PCR PROTOCOLS: A GUIDE TO METHODS AND APPLICATIONS, eds. Innis et al., Academic Press, San Diego (1990); Matilla et al., Nucleic Acids Res. 19: 4967 (1991); Eckert et al., PCR Methods and Applications 1:17 (1991); PCR 2: A PRACTICAL APPROACH, eds. McPherson et al., IRL Press, Oxford (2000); and U.S. Pat. No. 4,683,202). Other suitable amplification methods include the ligase chain reaction (LCR) (see Wu et al., Genomics 4:560 (1989) and Landegren et al., Science 241:1077 (1988)), transcription amplification (Kwoh et al., Proc. Natl. Acad. Sci. U.S.A. 86:1173 (1989)), self-sustained sequence replication (Guatelli et al., Proc. Nat. Acad. Sci. U.S.A. 87:1874 (1990)); isothermal methods (Walker et al., Proc. Natl. Acad. Sci. U.S.A. 89:392-6 (1992)); and nucleic acid-based sequence amplification (NASBA).

[0100] The amplified target region is assayed to determine the identity of at least one of the alleles present at a PS in the region. If both alleles of a locus are represented in the amplified target, it will be readily appreciated by the skilled artisan that only one allele will be detected at a PS in individuals who are homozygous at that PS, while two different alleles will be detected if the individual is heterozygous for that PS. The identity of the allele may be identified directly, known as positive-type identification, or by inference, referred to as negative-type identification. For example, where a SNP is known to be guanine or cytosine in a reference population, a PS may be positively determined to be either guanine or cytosine for an individual homozygous at that site, or both guanine and cytosine, if the individual is heterozygous at that site. Alternatively, the PS may be negatively determined to be not guanine (and thus cytosine/cytosine) or not cytosine (and thus guanine/guanine).

[0101] Identifying the allele or pair of alleles at a PS may be accomplished using any technique known to those of skill in the art. Preferred techniques permit rapid, accurate assaying of multiple PS with a minimum of sample handling. Some examples of suitable techniques include, but are not limited to, direct DNA sequencing of the amplified target region, capillary electrophoresis, hybridization of allele-specific probes, single-strand conformation polymorphism analysis, denaturing gradient gel electrophoresis, temperature gradient electrophoresis, mismatch detection; nucleic acid arrays, primer specific extension, protein detection, and other techniques well known in the art. (See, e.g., MOLECULAR CLONING: A LABORATORY MANUAL, Sambrook et al., Cold Spring Harbor Laboratory, New York (2001); CURRENT PROTOCOLS IN MOLECULAR BIOLOGY, Ausubel et al., John Wiley and Sons, New York (1997); Orita et al., Proc. Nat. Acad. Sci. U.S.A. 86:2766-70 (1989); Humphries et al. in MOLECULAR DIAGNOSIS OF GENETIC DISEASES, ed. Elles, pp. 321-30, Humana Press, Totowa, N.J. (1996); Wartell et al., Nucl. Acids Res. 18:2699-706 (1990); Hsu et al., Carcinogenesis 15:1657-62 (1994); Sheffield et al., Proc. Natl. Acad. Sci. U.S.A. 86:232-6 (1989); Winter et al., Proc. Natl. Acad. Sci. U.S.A. 82:7575 (1985); Myers et al., Nature 313:495 (1985); Rosenbaum et al., Biophys. Chem. 265:12753 (1987); Modrich, Ann. Rev. Genet. 25:229-53 (1991); U.S. Pat. Nos. 6,300,063, 5,837,832, and 5,459,039; and HuSNP Mapping Assay, reagent kit and user manual, Affymetrix Part No. 90094 (Affymetrix, Santa Clara, Calif.)).

[0102] In preferred embodiments, the identity of allele(s) at a PS is determined using a polymerase-mediated primer extension method. Several such methods have been described in the patent and scientific literature and include the “Genetic Bit Analysis” method (WO 92/15712) and the ligase/polymerase mediated genetic bit analysis. (U.S. Pat. No. 5,679,524). Related methods are disclosed in WO 91/02087, WO 90/09455, WO 95/17676, and U.S. Pat. Nos. 5,302,509 and 5,945,283. Extended primers containing the complement of the polymorphism may be detected by mass spectrometry as described in U.S. Pat. No. 5,605,798. Another primer extension method is allele-specific PCR. (Ruaño et al., supra (1989); Ruaño et al., supra (1991); WO 93/22456; Turki et al., J. Clin. Invest. 95:1635-41 (1995)). In addition, multiple PSs may be investigated by simultaneously amplifying multiple regions of the nucleic acid using sets of allele-specific primers as described in WO 89/10414.

[0103] Another primer extension method for identifying and analyzing polymorphisms employs single-base extension (SBE) of a fluorescently-labeled primer coupled with fluorescence resonance energy transfer (FRET) between the label of the added base and the label of the primer. Typically, the method, such as that described by Chen et al. (Proc. Nat. Acad. Sci. U.S.A. 94:10756-61 (1997)), uses a locus-specific oligonucleotide primer labeled on the 5′ terminus with 5-carboxyfluorescein (FAM). This labeled primer is designed so that the 3′ end is immediately adjacent to the polymorphic site of interest. The labeled primer is hybridized to the locus, and single base extension of the labeled primer is performed with fluorescently labeled dideoxyribonucleotides (ddNTPs) in dye-terminator sequencing fashion, except that no deoxyribonucleotides are present. An increase in fluorescence of the added ddNTP in response to excitation at the wavelength of the labeled primer is used to infer the identity of the added nucleotide.

[0104] In all of the above methods, the accuracy and specificity of an assay designed to detect the identity of the allele(s) at any PS is typically validated by performing the assay on DNA samples in which the identity of the allele(s) at that PS is known. Preferably a sample representing each possible allele is included in the validation process. For diploid loci such as those on autosomal and X chromosomes, the validation samples will typically include a sample that is homozygous for the major allele at the PS, a sample that is homozygous for the minor allele at the PS, and a sample that is heterozygous at that PS. These validation samples are typically also included as controls when performing the assay on a test sample (i.e., a sample in which the identity of the allele(s) at the PS is unknown). The specificity of an assay may also be confirmed by comparing the assay result for a test sample with the result obtained for the same sample using a different type of assay, such as by determining the sequence of an amplified target region believed to contain the PS of interest and comparing the determined sequence to a context sequence based on the reference sequence of the relevant gene. The length of the context sequence necessary to establish that the correct genomic position is being assayed will vary based on the uniqueness of the sequence in the target region (for example, there may be one or more highly homologous sequences located in other genomic regions). The skilled artisan can readily determine an appropriate length for a context sequence for any PS using known techniques such as blasting the context sequence against publicly available sequence databases. For amplified target regions, which provide a first level of specificity, examining the context sequence of about 30 to 60 bases on each side of the PS in known samples is typically sufficient to ensure that the assay design is specific for the PS of interest. Occasionally, a validated assay may fail to provide an unambiguous result for a test sample. This is usually the result of the sample having DNA of insufficient purity or quantity, and an unambiguous result is usually obtained by repurifying or reisolating the DNA sample or by assaying the sample using a different type of assay.

[0105] Alternatively, the presence or absence of a marker of the invention may be detected by detecting, in a protein sample obtained from the individual, a polypeptide specified by the polymorphism comprising the marker. The polypeptide may be detected using a monoclonal antibody specific for that polypeptide.

[0106] Further, in performing any of the methods described herein that require determining the presence or absence of a marker of antidepressant response, such determination may be made by consulting a data repository that contains sufficient information on the patient's genetic composition to determine whether the patient has the marker. Preferably, the data repository lists what marker(s) are present and absent in the individual. The data repository could include the individual's patient records, a medical data card, a file (e.g., a flat ASCII file) accessible by a computer or other electronic or non-electronic media on which appropriate information or genetic data can be stored. As used herein, a medical data card is a portable storage device such as a magnetic data card, a smart card, or a flash-memory card. If the data repository is a file accessible by a computer; such files may be located on various media, including: a server, a client, a hard disk, a CD, a DVD, a personal digital assistant, a tape, a zip disk, the computer's internal ROM (read-only-memory) or the internet or worldwide web. Other media for the storage of files accessible by a computer will be obvious to one skilled in the art.

### IV. Utility of Markers of Antidepressant Response

[0107] The phenotypic effect of the markers described herein support using these markers in a variety of methods and products, including, but not limited to, diagnostic methods and kits.

[0108] The utility of any of the methods or products described herein is not dependent on complete correlation between the presence of a genetic marker of the invention and the occurrence of antidepressant response, or upon whether a diagnostic or treatment method or kit is 100% accurate, or has an specific degree of accuracy, in determining the presence or absence of a genetic marker in every individual, or in predicting for every individual whether the individual will respond to an antidepressant. Thus, the inventors herein intend that the terms “determine,” “determining,” and “predicting” should not be interpreted as requiring a definite or certain result; instead these terms should be construed as meaning that a claimed method or kit provides an accurate result for the majority of individuals, or that the result or prediction for any given individual is more likely to be correct than incorrect. Preferably, the accuracy of the result provided by a diagnostic method or kit of the invention is one that a skilled artisan or regulatory authority would consider suitable for the particular application in which the method or kit is used.

[0109] An individual to be tested in any of the methods described herein is a human subject that is a candidate for treatment with antidepressants. In some embodiments, the individual has been diagnosed with, or exhibits a symptom of, a disease for which an antidepressant is approved. In other embodiments, the antidepressant is not approved for treating the diagnosed disease or exhibited symptom(s), but the prescribing physician believes the drug may be helpful in treating the individual. In preferred embodiments of the invention, the individual has any disease or condition for which the antidepressant has displayed some degree of clinical utility.

[0110] A. Diagnostic Methods and Kits

[0111] The diagnostic methods and kits of the invention are useful in clinical diagnostic applications. However, as used herein, the term “diagnostic” is not limited to clinical or medical uses, and that diagnostic methods and kits of the invention claimed herein are also useful in any research application in which it is desirable to test a subject for the presence or absence of any genetic marker described in Section II above. In preferred embodiments, the diagnostic methods and kits of the invention test for, or are designed to test for, respectively, the presence or absence of a set of ACE, ATP5C3, BCL2L1, CYP2C9, DRD3, FOS, DTNBP1, GABRG3, GRIA4, LAMA4, MAPK1, NPY1R, OPRD1, OPRM1, PER3, PLCB1, PSMD1, ABI1, LOC402382, or NCALD markers, which set may comprise a marker from, respectively, Tables A-1 through A-20 (Appendix A), or may comprise all ACE, ATP5C3, BCL2L1, CYP2C9, DRD3, FOS, DTNBP1, GABRG3, GRIA4, LAMA4, MAPK1, NPY1R, OPRD1, OPRM1, PER3, PLCB1, PSMD1, ABI1, LOC402382, and NCALD markers described herein.

[0112] It is contemplated that any or all of the diagnostic methods claimed herein may be performed by a testing laboratory on an individual's biological sample provided directly by the individual or by any third party, such as the individual's physician, a relative of the individual, a person conducting a research study in which the individual is participating and the like. The third party may have a commercial relationship with the testing laboratory, or may be totally independent thereof. Where the results of the diagnostic method is to be used for clinical purposes, the testing laboratory is preferably a clinical laboratory who performs the diagnostic method in compliance with all applicable laws and regulations in the locality where the testing is performed as well as where the individual resides.

[0113] In some embodiments, the testing laboratory does not know the identity of the individual whose sample it is testing. For example, the sample may be merely identified by a number or some other code (a “sample ID”) and the results of the diagnostic method can be reported to the party ordering the test using the sample ID. In preferred embodiments, the link between the identity of an individual and the individual's sample is known only to the individual or to the individual's physician. In other applications, such as research studies, the link may be broken prior to the testing laboratory sending a report of the results; thus, the results cannot be obtained by the individual or the individual's insurance company.

[0114] Kits of the invention, which are useful for detecting the presence or absence of a ACE, ATP5C3, BCL2L1, CYP2C9, DRD3, FOS, DTNBP1, GABRG3, GRIA4, LAMA4, MAPK1, NPY1R, OPRD1, OPRM1, PER3, PLCB1, PSMD1, ABI1, LOC402382, or NCALD marker in an individual, comprise a set of oligonucleotides designed for identifying each of the alleles at each PS in the marker. In preferred embodiments, the set of oligonucleotides is designed to identify the alleles at all polymorphic sites in all of the ACE, ATP5C3, BCL2L1, CYP2C9, DRD3, FOS, DTNBP1, GABRG3, GRIA4, LAMA4, MAPK1, NPY1R, OPRD1, OPRM1, PER3, PLCB1, PSMD1, ABI1, LOC402382, or NCALD markers described herein. In particularly preferred embodiments, the set of oligonucleotides is designed to identify both alleles at each PS in a set of ACE, ATP5C3, BCL2L1, CYP2C9, DRD3, FOS, DTNBP1, GABRG3, GRIA4, LAMA4, MAPK1, NPY1R, OPRD1, OPRM1, PER3, PLCB1, PSMD1, ABI1, LOC402382, or NCALD markers, with the marker set comprising a marker from, respectively, Tables A-1 through A-20 (Appendix A).

[0115] In some embodiments, the oligonucleotides in the kit are either allele-specific probes or allele-specific primers. In other embodiments, the kit comprises primer-extension oligonucleotides. In still further embodiments, the set of oligonucleotides is a combination of allele-specific probes, allele-specific primers, or primer-extension oligonucleotides. The kit may comprise oligonucleotides designed for genotyping other PS, which may be in the ACE, ATP5C3, BCL2L1, CYP2C9, DRD3, FOS, DTNBP1, GABRG3, GRIA4, LAMA4, MAPK1, NPY1R, OPRD1, OPRM1, PER3, PLCB1, PSMD1, ABI1, LOC402382, or NCALD gene or at any other locus of interest in the human genome.

[0116] Oligonucleotides in kits of the invention must be capable of specifically hybridizing to a target region of a polynucleotide. As used herein, specific hybridization means the oligonucleotide forms an anti-parallel double-stranded structure with the target region under certain hybridizing conditions, while failing to form such a structure with non-target regions when incubated with the polynucleotide under the same hybridizing conditions. In some embodiments, the target region contains a PS in a ACE, ATP5C3, BCL2L1, CYP2C9, DRD3, FOS, DTNBP1, GABRG3, GRIA4, LAMA4, MAPK1, NPY1R, OPRD1, OPRM1, PER3, PLCB1, PSMD1, ABI1, LOC402382, or NCALD marker, while in other embodiments, the target region is located one to 10 nucleotides from the PS.

[0117] The composition and length of each oligonucleotide in the kit will depend on the nature of the genomic region containing the PS as well as the type of assay to be performed with the oligonucleotide and is readily determined by the skilled artisan. For example, the polynucleotide to be used in the assay may constitute an amplification product, and thus the required specificity of the oligonucleotide is with respect to hybridization to the target region in the amplification product rather than in genomic DNA isolated from the individual. As another example, if each PS in a ACE, ATP5C3, BCL2L1, CYP2C9, DRD3, FOS, DTNBP1, GABRG3, GRIA4, LAMA4, MAPK1, NPY1R, OPRD1, OPRM1, PER3, PLCB1, PSMD1, ABI1, LOC402382, or NCALD marker is to be assayed simultaneously, the melting temperatures for the oligonucleotides in the kit will typically be within a narrow range, preferably less than about 5° C. and more preferably less than about 2° C.

[0118] In preferred embodiments, each oligonucleotide in the kit is a perfect complement of its target region. An oligonucleotide is said to be a “perfect” or “complete” complement of another nucleic acid molecule if every nucleotide of one of the molecules is complementary to the nucleotide at the corresponding position of the other molecule. While perfectly complementary oligonucleotides are preferred for detecting polymorphisms, departures from complete complementarity are contemplated where such departures do not prevent the molecule from specifically hybridizing to the target region as defined above. For example, an oligonucleotide primer may have a non-complementary fragment at its 5′ end, with the remainder of the primer being completely complementary to the target region. Alternatively, non-complementary nucleotides may be interspersed into the probe or primer as long as the resulting probe or primer is still capable of specifically hybridizing to the target region.

[0119] In some preferred embodiments, each oligonucleotide in the kit specifically hybridizes to its target region under stringent hybridization conditions. Stringent hybridization conditions are sequence-dependent and vary depending on the circumstances. Generally, stringent conditions are selected to be about 5° C. lower than the thermal melting point (Tₘ) for the specific sequence at a defined ionic strength and pH. The Tₘ is the temperature (under defined ionic strength, pH, and nucleic acid concentration) at which 50% of the probes complementary to the target sequence hybridize to the target sequence at equilibrium. As the target sequences are generally present in excess, at Tₘ, 50% of the probes are occupied at equilibrium. Typically, stringent conditions include a salt concentration of at least about 0.01 to 1.0 M Na ion concentration (or other salts) at pH 7.0 to 8.3 and the temperature is at least about 25° C. for short oligonucleotide probes (e.g., 10 to 50 nucleotides). Stringent conditions can also be achieved with the addition of destabilizing agents such as formamide. For example, conditions of 5×SSPE (750 mM NaCl, 50 mM NaPhosphate, 5 mM EDTA, pH 7.4) and a temperature of 25-30° C. are suitable for allele-specific probe hybridizations. Additional stringent conditions can be found in chapters 7, 9, and 11 in MOLECULAR CLONING: A LABORATORY MANUAL, Sambrook et al., Cold Spring Harbor Laboratory, New York (2001), and in NUCLEIC ACID HYBRIDIZATION, A PRACTICAL APPROACH, Haymes et al., IRL Press, Washington, D.C. (1985).

[0120] A preferred, non-limiting example of stringent hybridization conditions includes hybridization in 4× sodium chloride/sodium citrate (SSC), at about 65-70° C. (or alternatively hybridization in 4×SSC plus 50% formamide at about 42-50° C.) followed by one or more washes in 1×SSC, at about 65-70° C. A preferred, non-limiting example of highly stringent hybridization conditions includes hybridization in 1×SSC, at about 65-70° C. (or alternatively hybridization in 1×SSC plus 50% formamide at about 42-50° C.) followed by one or more washes in 0.3×SSC, at about 65-70° C. A preferred, non-limiting example of reduced stringency hybridization conditions includes hybridization in 4×SSC, at about 50-60° C. (or alternatively hybridization in 6×SSC plus 50% formamide at about 40-45° C.) followed by one or more washes in 2×SSC, at about 50-60° C. Ranges intermediate to the above-recited values, e.g., at 65-70° C. or at 42-50° C. are also intended to be encompassed by the present invention. SSPE (1×SSPE is 0.15M NaCl, 10 mM NaH₂PO₄, and 1.25 mM EDTA, pH 7.4) can be substituted for SSC (1×SSC is 0.15M NaCl and 15 mM sodium citrate) in the hybridization and wash buffers; washes are performed for 15 minutes each after hybridization is complete.

[0121] The hybridization temperature for hybrids anticipated to be less than 50 base pairs in length should be 5-10° C. less than the melting temperature (Tₘ) of the hybrid, where Tₘ is determined according to the following equations. For hybrids less than 18 base pairs in length, Tₘ(° C.)=2(# of A+T bases)+4(# of G+C bases). For hybrids between 18 and 49 base pairs in length, Tₘ(° C.)=81.5+16.6(log₁₀[Na⁺])+0.41 (%G+C)−(600/N), where N is the number of bases in the hybrid, and [Na⁺] is the concentration of sodium ions in the hybridization buffer ([Na⁺] for 1×SSC=0.165 M).

[0122] The oligonucleotides in kits of the invention may be comprised of any phosphorylation state of ribonucleotides, deoxyribonucleotides, and acyclic nucleotide derivatives, and other functionally equivalent derivatives. Alternatively, the oligonucleotides may have a phosphate-free backbone, which may be comprised of linkages such as carboxymethyl, acetamidate, carbamate, polyamide (peptide nucleic acid (PNA)) and the like. (See Varma in MOLECULAR BIOLOGY AND BIOTECHNOLOGY: A COMPREHENSIVE DESK REFERENCE, ed. Meyers, pp. 617-20, VCH Publishers, Inc. (1995)). The oligonucleotides may be prepared by chemical synthesis using any suitable methodology known in the art, or may be derived from a biological sample, for example, by restriction digestion. The oligonucleotides may contain a detectable label, according to any technique known in the art, including use of radiolabels, fluorescent labels, enzymatic labels, proteins, haptens, antibodies, sequence tags and the like. The oligonucleotides in the kit may be manufactured and marketed as analyte specific reagents (ASRs) or may be constitute components of an approved diagnostic device.

[0123] In some embodiments, the set of oligonucleotides in the kit have different labels to allow determining the identity of the alleles at two or more PSs simultaneously. The oligonucleotides may also comprise an ordered array that is immobilized on a solid surface such as a microchip, bead, or glass slide (see, e.g., WO 98/20020 and WO 98/20019). Kits comprising such immobilized oligonucleotides may be designed to perform a variety of polymorphism detection assays, including but not limited to probe hybridization and polymerase extension assays.

[0124] Kits of the invention may also contain other reagents such as hybridization buffer (e.g., where the oligonucleotides are to be used as allele-specific probes) or dideoxynucleotide triphosphates (ddNTPs; e.g., where the alleles at the polymorphic sites are to be detected by primer extension). Kits designed for use in polymerase-mediated genotyping assays, may also contain a polymerase and a reaction buffer optimized for the polymerase-mediated assay to be performed. Kits of the invention may also include reagents to detect when a specific hybridization has occurred or a specific polymerase-mediated extension has occurred. Such detection reagents may include biotin- or fluorescent-tagged oligonucleotides or ddNTPs and/or an enzyme-labeled antibody and one or more substrates that generate a detectable signal when acted on by the enzyme. It will be understood by the skilled artisan that the set of oligonucleotides and reagents for performing the assay will be provided in separate receptacles placed in the kit container if appropriate to preserve biological or chemical activity and enable proper use in the assay.

[0125] In other preferred embodiments, each of the oligonucleotides and all other reagents in the kit have been quality tested for optimal performance in an assay designed to determine each of the alleles at the set of PSs comprising a ACE, ATP5C3, BCL2L1, CYP2C9, DRD3, FOS, DTNBP1, GABRG3, GRIA4, LAMA4, MAPK1, NPY1R, OPRD1, OPRM1, PER3, PLCB1, PSMD1, ABI1, LOC402382, or NCALD marker. In more preferred embodiments, the kit includes an instruction manual that describes the various ways the kit may be used to detect the presence or absence of a ACE, ATP5C3, BCL2L1, CYP2C9, DRD3, FOS, DTNBP1, GABRG3, GRIA4, LAMA4, MAPK1, NPY1R, OPRD1, OPRM1, PER3, PLCB1, PSMD1, ABI1, LOC402382, or NCALD marker.

[0126] In some preferred embodiments, the set of oligonucleotides in the kit are allele-specific oligonucleotides. As used herein, the term allele-specific oligonucleotide (ASO) means an oligonucleotide that is able, under sufficiently stringent conditions, to hybridize specifically to one allele of a PS, at a target region containing the PS while not hybridizing to the same region containing a different allele. As understood by the skilled artisan, allele-specificity will depend upon a variety of readily optimized stringency conditions, including salt and formamide concentrations, as well as temperatures for both the hybridization and washing steps. Examples of hybridization and washing conditions typically used for ASO probes and primers are found in Kogan et al. in PCR PROTOCOLS: A GUIDE TO METHODS AND APPLICATIONS, eds. Innis et al., Academic Press, San Diego (1990), and Ruaño et al., supra (1990).

[0127] Typically, an ASO will be perfectly complementary to one allele while containing a single mismatch for another allele. In ASO probes, the single mismatch is preferably within a central position of the oligonucleotide probe as it aligns with the polymorphic site in the target region (e.g., approximately the 7^{th} or 8^{th} position in a 15mer, the 8^{th} or 9^{th} position in a 16mer, and the 10^{th} or 11^{th} position in a 20mer). The single mismatch in ASO primers is located at the 3′ terminal nucleotide, or preferably at the 3′ penultimate nucleotide. ASO probes and primers hybridizing to either the coding or noncoding strand are contemplated by the invention.

[0128] In other preferred embodiments, the kit comprises a pair of allele-specific oligonucleotides for each PS to be assayed, with one member of the pair being specific for one allele and the other member being specific for the other allele. In such embodiments, the oligonucleotides in the pair may have different lengths or have different detectable labels to allow the user of the kit to determine which allele-specific oligonucleotide has specifically hybridized to the target region, and thus determine which allele is present in the individual at the assayed PS.

[0129] In still other preferred embodiments, the oligonucleotides in the kit are primer-extension oligonucleotides. Termination mixes for polymerase-mediated extension from any of these oligonucleotides are chosen to terminate extension of the oligonucleotide at the PS of interest, or one base thereafter, depending on the alternative nucleotides present at the PS.

[0130] B. Methods of Treatment

[0131] In addition to diagnostic methods and kits, the invention provides a method for treating depression in an individual. This method comprises determining the presence or absence in the individual of an ACE, ATP5C3, BCL2L1, CYP2C9, DRD3, FOS, DTNBP1, GABRG3, GRIA4, LAMA4, MAPK1, NPY1R, OPRD1, OPRM1, PER3, PLCB1, PSMD1, ABI1, LOC402382, or NCALD marker, and making a treatment decision based on the results. If it is determined that the marker is present, then the decision is to prescribe to the individual the lowest approved dose of an antidepressant. If however it is determined that the marker is absent, then the decision is to either prescribe to the individual the antidepressant at a dose that is higher than the lowest approved dose, or prescribe to the individual a therapy not including the antidepressant that is effective in treating depression.

[0132] Preferred embodiments of the invention are described in the following examples. Other embodiments within the scope of the claims herein will be apparent to one skilled in the art from consideration of the specification or practice of the invention as disclosed herein. It is intended that the specification, together with the examples, be considered exemplary only, with the scope and spirit of the invention being indicated by the claims that follow the examples.

### EXAMPLES

[0133] The Examples herein are meant to exemplify the various aspects of carrying out the invention and are not intended to limit the scope of the invention in any way. The Examples do not include detailed descriptions for conventional methods employed, such as the design of PCR primers, performing PCR, and haplotyping. Such methods are well known to those skilled in the art and are described herein or in numerous publications, for example, MOLECULAR CLONING: A LABORATORY MANUAL, Sambrook et al., Cold Spring Harbor Laboratory, New York (2001).

### Example 1

[0134] Vilazodone is an indolealkylamine derivative under development for the treatment of MDD. The full chemical designation is 5-{4-[4-(5-Cyano-3-indolyl)-butyl]-1-piperazinyl}-benzofuran-2-carboxamide hydrochloride. Vilazodone has two major components to its pharmacological profile: it is a potent and selective serotonin reuptake inhibitor (SSRI), and it is a partial 5-HT1A receptor agonist. It is anticipated that this dual mechanism of action will confer additional benefits for both efficacy and some aspects of tolerability relative to pure SSRIs.

[0135] The importance of the 5-HT1A receptor in the response to antidepressant drugs has attracted much attention in the scientific literature. Artigas et al. have reported improved response to treatment and improved response time after combination therapy with the 5-HT1A antagonist/partial agonist pindolol added to SSRIs. (Arch. Gen. Psychiatry 54:248 (1991)). The mechanism underlying this augmentation effect is not yet clear in view of the complex actions of these drugs at pre-, post-, and somato-dendritic receptor sites. These types of studies suggest that, through a dual or multiple target approach, it should be possible to develop new antidepressants that will improve the treatment of depression. Drugs such as vilazodone, which combines serotonin reuptake blockade and agonism of the 5-HT1A receptor, are therefore promising opportunities in depression treatment.

[0136] As part of the vilazodone development program, five Phase II studies have been conducted, all in patients with MDD. These studies randomized 2,098 patients for eight weeks of treatment, 1196 of whom received vilazodone. The most common adverse events, reported by at least ten percent of vilazodone-treated patients are nausea, diarrhea, headache, insomnia, dizziness, dry mouth, somnolence, abnormal dreams, and vomiting. A pre-clinical study in beagle dogs showed treatment emergent corneal opacities and reduced tear production. Hence, thorough opthalmologic examinations have also been conducted in these studies. The only clinically significant finding from these examinations was an increase in the incidence of mild ocular drying in subjects treated with vilazodone.

[0137] Although vilazodone has been generally shown to be safe, efficacy has not yet been established. In each of the Phase II studies, vilazodone did not show a statistically significant difference on the primary efficacy variable compared to placebo. It should be noted, however, that in the three studies in which an active comparator already approved for the treatment of MDD was used (citalopram or fluoxetine), the active comparator also did not show a statistically significant improvement in Hamilton Depression Scale (HAM-D) total score versus placebo. Overall, the placebo response rate in these studies was 48% when defined as a 50% reduction from baseline in HAM-D, thereby limiting the ability of these studies to demonstrate the efficacy of vilazodone or of the active comparators.

[0138] Exploratory analyses, using established methods for enriching patient groups to differentiate between active treatment and placebo, demonstrate the potential for demonstrating the efficacy of vilazodone. For example, by evaluating response stratified by baseline disease severity, a larger treatment effect is observed for more severely depressed patients.

[0139] There was a wide range of inter-individual variability in response to vilazodone as well as to placebo and the active comparators. This variability may be partially due to genetic differences among the individuals treated. This example illustrates a randomized, double-blind, placebo-controlled, multicenter, eight-week study designed to discover genetic markers of response to vilazodone in adult patients diagnosed with MDD by the DSM-IV-TR criteria. Patients must have met all of the following inclusion criteria to be considered for enrollment in the study: (1) 18-65 years of age; (2) diagnosis of MDD, single episode or recurrent, according to DSM-IV-TR (296.2/296.3) with a current Major Depressive Episode of less than one year's duration with a minimum duration of at least 4 weeks; (3) HAM-D score≧22 on the first 17 items of the 21-item HAM-D at screening and baseline visits; (4) HAM-D item 1 (depressed mood) score≧2 at the screening visit and the baseline visit; (5) provision of written informed consent to participate; and (6) ability to speak, read and understand English and to respond to questions and follow simple instructions.

[0140] Patients meeting any of the following exclusion criteria were excluded from the study: (1) current (or within six months prior to the screening visit) Axis I disorder of Post Traumatic Stress Disorder, Eating Disorder, or Obsessive Compulsive Disorder (Generalized Anxiety Disorder, Social Phobia or Simple Phobia were allowed); (2) history of schizophrenia, schizoaffective disorder or bipolar I or II disorder (with a history of hypomanic or manic episodes); (3) substance abuse (alcohol or drugs) (DSM-IV-TR) within three months prior to the screening visit or substance dependence within six months prior to the screening visit, (4) possession of any of the following DSM-IV-TR MDD Specifiers: (a) Catatonic Features, (b) Postpartum Onset, and (c) Seasonal Pattern; (5) receipt of psychotherapy within the twelve weeks prior to the screening visit; (6) patients who, in the investigator's judgment, posed a serious suicidal or homicidal risk at the screening visit or the baseline visit or who made a suicide attempt within six months prior to the screening visit; (7) patients who had an inadequate response to at least two consecutive antidepressants from different classes given at adequate doses for an adequate duration; (8) patients who received electroconvulsive therapy within the six months prior to the screening visit; (9) patients who had taken psychotropic drugs (patients taking psychotropic drugs must have discontinued these prior to the screening visit, with the minimum discontinuation periods being four weeks prior to the screening visit for monoamine oxidase inhibitors (MAOIs) and fluoxetine, two weeks prior to the screening visit for all other antidepressants, sedatives, hypnotics, beta adrenergic blockers, benzodiazepines or other psychoactive medications (including psychoactive herbal treatments); and twelve weeks prior to the screening visit for depot neuroleptics; (10) patients taking migraine medications with a serotonergic mechanism of action (e.g., sumatriptan, naritriptan, ergot derivatives); (11) patients with a known hypersensitivity to SSRIs or 5-HT1a agonists; (12) patients previously treated with vilazodone; (13) patients with a history of clinically significant cardiac, renal, neurologic, cerebrovascular, hepatic, hematologic, metabolic or pulmonary disease, including patients who had a myocardial infarction within one year prior to the screening visit, patients with diabetes mellitus who require insulin treatment (oral antidiabetic agents allowed), patients with a history of seizure disorders (except for febrile seizures in childhood), patients with a prior or current history of neoplastic disease (squamous cell carcinoma of the skin allowed), patients with renal impairment (serum creatinine≧1.7 mg/dL) or hepatic impairment (ALT or AST three times the upper limit of normal), patients who are not euthyroid, unless on thyroid medication (patients maintained on thyroid medication must have been euthyroid for a period of at least six months prior to the screening visit); patients with any serious medical disorder or condition that would have, in the investigator's opinion, precluded the administration of study medication; (14) patients with Sicca syndrome; (15) pregnant or lactating patients, or patients planning on becoming pregnant during the study [all female patients who were not at least one year post menopausal or irreversibly surgically sterilized must have had a negative urine pregnancy test at Visit 1 and 2, and must have been determined to not be at risk of pregnancy and/or must have been using adequate and reliable contraception throughout the trial, with adequate contraception being defined as continuous use of any of Norplant® (inserted at least 3 months prior to administration); medroxyprogesterone acetate injection (given >14 days prior to study entry); oral contraception (taken as directed for >1 month prior to study entry); double-barrier method (e.g., condom and spermicide); intrauterine device (inserted >4 weeks prior to study entry); or monogamous partner with a bilateral vasectomy (procedure performed >3 months prior to study entry)]; (16) patients with clinically significant abnormalities on ECG (abnormalities determined by the investigator and the physician interpreting the ECG) not resolved at the baseline visit; (17) patients having clinically significant abnormal laboratory findings at the screening visit not resolved at the baseline visit; (18) patients with a positive drug screen (one re-screen after four weeks was allowed for those patients testing positive for marijuana); (19) patients who, in the opinion of the investigator, would have been noncompliant with the visit schedule or study procedures (e.g., illiteracy, planned vacations or planned hospitalizations during the study); and (20) patients that had taken an investigational drug or participated in an investigational drug trial within 30 days prior to the screening visit.

[0141] Following randomization into vilazodone and placebo groups, patients began the forced titration schedule. Patients received 10 mg qd until Visit 3 (approximately Day 7). At Visit 3 patients received 20 mg qd until Visit 4 (approximately Day 14). At Visit 4 patients received the target dose of 40 mg qd (approximately Day 15). A total of 152 patients completed the vilazodone arm, while 154 patients completed the placebo arm.

### Example 2

[0142] This example illustrates genotyping of the study group for the ACE, ATP5C3, BCL2L1, CYP2C9, DRD3, FOS, DTNBP1, GABRG3, GRIA4, LAMA4, MAPK1, NPY1R, OPRD1, OPRM1, PER3, PLCB1, and PSMD1 polymorphic sites selected by the inventors herein for analysis. Genomic DNA was isolated from blood obtained from each individual and amplified target regions containing the polymorphic sites in Tables A-21 to A-37 (Appendix A) were sequenced to determine the genotypes at these polymorphic sites. Tailed (Universal M13 Forward and Reverse) PCR primers were designed using the sequence of SEQ ID NO:1 for ACE, SEQ ID NO:2 for ATP5C3, SEQ ID NO:3 for BCL2L1, SEQ ID NO:4 for CYP2C9, SEQ ID NO:5 for DRD3, SEQ ID NO:6 for FOS, SEQ ID NO:7 for DTNBP1, SEQ ID NO:8 for GABRG3, SEQ ID NO:9 for GRIA4, SEQ ID NO:10 for LAMA4, SEQ ID NO:11 for MAPK1, SEQ ID NO:12 for NPY1R, SEQ ID NO:13 for OPRD1, SEQ ID NO:14 for OPRM1, SEQ ID NO:15 for PER3, SEQ ID NO:16 for PLCB1, and SEQ ID NO:17 for PSMD1. Amplified PCR products were sequenced using Applied Biosystems' Big Dye® Terminator v 3.1 cycle sequencing kit according to manufacturer's instructions. The reaction products were then electrophoresed using an Applied Biosystems 3700 or 3730xl DNA analyzer. Polymorphisms were identified using the Polyphred program, and confirmed by visual inspection.

### Example 4

[0143] This example illustrates genotyping of the study group for the ABI1, LOC402382, and NCALD polymorphic sites selected by the inventors herein for analysis. Genomic DNA (250 ng) was digested with a restriction enzyme (Nsp I or Sty I) and ligated to adaptors that recognize the cohesive four base-pair (bp) overhangs. All fragments resulting from restriction enzyme digestion, regardless of size, were substrates for adaptor ligation. A generic primer that recognized the adaptor sequence was used to amplify adaptor-ligated DNA fragments. PCR conditions were optimized to preferentially amplify fragments in the 200 to 1,100 bp size range. The amplified DNA was then fragmented, labeled, and hybridized to an Affymetrix GeneChip® Human Mapping 250K Array. All single nucleotide polymorphisms (SNPs) on the array went through a rigorous screening and validation process. Optimal SNPs were selected and tiled on arrays based on accuracy, call rate, and linkage disequilibrium analysis in three populations across the genome. The median physical distance between SNPs was 2.5 kb and the average distance between SNPs was 5.8 kb. The average heterozygosity of these SNPs was 0.30. Eighty-five percent of the human genome is within 10 kb of a SNP.

### Example 4

[0144] This example illustrates the deduction of markers from the genotyping data generated in Examples 2 and 3.

[0145] Haplotypes were estimated from the unphased genotypes using a computer-implemented algorithm for assigning haplotypes to unrelated individuals in a population sample, essentially as described in WO 01/80156. In this method, haplotypes are assigned directly from individuals who are homozygous at all sites or heterozygous at no more than one of the variable sites. This list of haplotypes is then used to deconvolute the unphased genotypes in the remaining (multiply heterozygous) individuals.

[0146] A quality control analysis was performed on the deduced haplotypes, which included analysis of the frequencies of the haplotypes and individual SNPs therein for compliance with principles of Hardy-Weinberg equilibrium.

### Example 5

[0147] This example illustrates analysis of the markers in Tables A-1 to A-17 (Appendix A) for association with vilazodone response. A proprietary algorithm was used as a tool for finding associations between markers and outcomes. The clinical outcomes were improvement in disease over eight weeks of treatment with vilazodone as measured by the MADRS scale. A linear model was first fitted on the covariates, which were treatment center, race, ethnicity, and baseline values. The resulting residuals were used as the outcome in a t-test in which, for each haplotype being considered, the dominant or recessive mode divided the sample into two groups.

[0148] For the results obtained on the analyses, adjustments were made for multiple comparisons, using a permutation test. (See, e.g., PERMUTATION TESTS: A PRACTICAL GUIDE TO RESAMPLING METHODS FOR TESTING HYPOTHESES, 2^{nd} ed., Good, Springer Series in Statistics, New York (2000)). In this test, the marker data for each observation were kept constant, while all the remaining variables (outcome and covariates) were randomly permuted so that covariates always stayed with the same outcome. The permutation model was fitted for each of the several haplotypes, and the lowest p-value was kept. In total, up to 6250 permutations were done, depending on the level of significance. Various markers were identified that show a correlation with vilazodone response, as measured by having no more than ten percent of the lowest permutation p-values be as low or lower than the marker p-value from the original set. The unadjusted (“raw”) p-values, the differences between the mean MADRS score decreases among the patients who carry the markers compared with those who do not, and the percentages of the patients who carry the markers are shown in Tables 1-17 below.

TABLE 1
Markers in ACE Associated with Better Vilazodone Response
Measured as Change of MADRS

| | | Re- | | | | |
|---|---|---|---|---|---|---|
| | | sponse | Percent | | | Percent |
| | | Differ- | with | | Response | with |
| | | ence | Marker | p | Difference | Marker |
| | p (all | (all | (all | (Cauc. | (Cauc. | (Cauc. |
| Marker | ethnic.) | ethnic.) | ethnic.) | only) | only) | only) |
| 1 | 0.00007 | −6 | 71 | NA | NA | NA |
| 2 | 0.00035 | −5.4 | 70 | 0.000328 | −5.6 | 69 |
| 3 | 0.000083 | −5.5 | 57 | NA | NA | NA |
| 4 | 0.002791 | −4.5 | 68 | 0.003758 | −4.6 | 70 |
| 5 | 0.000035 | −5.7 | 56 | NA | NA | NA |
| 6 | 0.00011 | −5.4 | 54 | NA | NA | NA |
| 7 | 0.000067 | −5.6 | 57 | 0.007019 | −4 | 61 |
| 8 | 0.000067 | −5.6 | 57 | NA | NA | NA |
| 9 | 0.000164 | −5.5 | 65 | NA | NA | NA |
| 10 | 0.000019 | −6.1 | 63 | NA | NA | NA |
| 11 | 0.002137 | −4.6 | 67 | 0.004984 | −4.4 | 69 |
| 12 | 0.000352 | −5 | 57 | 0.017109 | −3.5 | 61 |
| 13 | 0.000401 | −4.9 | 56 | 0.008751 | −3.9 | 60 |
| 14 | 0.000125 | −6.3 | 71 | 0.000154 | −5.9 | 70 |
| 15 | 0.009284 | −4.1 | 27 | 0.003649 | −4.6 | 29 |
| 16 | 0.027298 | −3.2 | 64 | 0.004663 | −4.6 | 73 |
| 17 | 0.003483 | −5.3 | 82 | 0.000145 | −6.9 | 81 |
| 18 | 0.001236 | −5.8 | 82 | 0.000438 | −7 | 84 |
| 19 | 0.003387 | −4.7 | 74 | 0.000154 | −6 | 71 |
| 20 | 0.002075 | −5.1 | 24 | 0.000382 | −5.8 | 26 |
| 21 | 0.000874 | −5.6 | 22 | 0.000128 | −6.4 | 24 |
| 22 | 0.00104 | −5.6 | 21 | 0.000045 | −6.8 | 24 |
| 23 | 0.001961 | −5.9 | 78 | 0.000155 | −7.3 | 84 |
| 24 | 0.00271 | −5.5 | 83 | 0.000084 | −7.2 | 81 |
| 25 | 0.005992 | −4 | 64 | 0.002285 | −4.7 | 68 |
| 26 | 0.004748 | −4.7 | 78 | 0.000292 | −6.9 | 83 |
| 27 | 0.002791 | −4.5 | 68 | 0.003758 | −4.6 | 70 |
| 28 | 0.002791 | −4.5 | 68 | 0.003758 | −4.6 | 70 |
| 29 | 0.000035 | −5.7 | 56 | NA | NA | NA |
| 30 | 0.000035 | −5.7 | 56 | NA | NA | NA |
| 31 | 0.000164 | −5.5 | 65 | NA | NA | NA |
| 32 | 0.002137 | −4.6 | 67 | 0.004984 | −4.4 | 69 |
| 33 | 0.002137 | −4.6 | 67 | 0.004984 | −4.4 | 69 |
| 34 | 0.000352 | −5 | 57 | 0.017109 | −3.5 | 61 |
| 35 | 0.000401 | −4.9 | 56 | 0.008751 | −3.9 | 60 |
| 36 | 0.000401 | −4.9 | 56 | 0.008751 | −3.9 | 60 |
| 37 | 0.001961 | −5.9 | 78 | 0.000155 | −7.3 | 84 |
| 38 | 0.001961 | −5.9 | 78 | 0.000155 | −7.3 | 84 |
| 39 | 0.001961 | −5.9 | 78 | 0.000155 | −7.3 | 84 |
| 40 | 0.001961 | −5.9 | 78 | 0.000155 | −7.3 | 84 |
| 41 | 0.001961 | −5.9 | 78 | 0.000155 | −7.3 | 84 |
| 42 | 0.00271 | −5.5 | 83 | 0.000084 | −7.2 | 81 |
| 43 | 0.00271 | −5.5 | 83 | 0.000084 | −7.2 | 81 |
| 44 | 0.00271 | −5.5 | 83 | 0.000084 | −7.2 | 81 |
| 45 | 0.00271 | −5.5 | 83 | 0.000084 | −7.2 | 81 |
| 46 | 0.00271 | −5.5 | 83 | 0.000084 | −7.2 | 81 |
| 47 | 0.00271 | −5.5 | 83 | 0.000084 | −7.2 | 81 |

TABLE 2
Markers in ATP5G3 Associated with Better Vilazodone Response
Measured as Change of MADRS

| | | | Percent | | | Percent |
|---|---|---|---|---|---|---|
| | | Response | with | | Response | with |
| | | difference | marker | | difference | marker |
| | p (all | (all | (all | p (Cauc. | (Cauc. | (Cauc. |
| Marker | ethnic.) | ethnic.) | ethnic.) | only) | only) | only) |
| 1 | 0.00291 | −5.6 | 17 | 0.000367 | −6.6 | 19 |
| 2 | 0.02269 | −5.4 | 10 | 0.009542 | −5.9 | 12 |

TABLE 3
Markers in BCL2L1 associated with better Vilazodone response
measured as change of MADRS

| | | Re- | | | | |
|---|---|---|---|---|---|---|
| | | sponse | Percent | | | Percent |
| | | differ- | with | | Response | with |
| | | ence | marker | | difference | marker |
| | p (all | (all | (all | p (Cauc. | (Cauc. | (Cauc. |
| Marker | ethnic.) | ethnic.) | ethnic.) | only) | only) | only) |
| 1 | 0.052536 | −3.9 | 86 | 0.004809 | −6.4 | 0.88 |
| 5 | 0.052536 | −3.9 | 86 | 0.004809 | −6.4 | 88 |
| 6 | 0.052536 | −3.9 | 0.86 | 0.004809 | −6.4 | 0.88 |
| 7 | 0.052536 | −3.9 | 0.86 | 0.004809 | −6.4 | 0.88 |
| 8 | 0.052536 | −3.9 | 0.86 | 0.004809 | −6.4 | 0.88 |
| 9 | 0.052536 | −3.9 | 0.86 | 0.004809 | −6.4 | 0.88 |
| 2 | 0.321106 | −1.4 | 0.52 | 0.012807 | −3.6 | 0.53 |
| 10 | 0.321106 | −1.4 | 0.52 | 0.012807 | −3.6 | 0.53 |
| 3 | 0.174836 | −2 | 0.61 | 0.007243 | −4 | 0.6 |
| 11 | 0.174836 | −2 | 0.61 | 0.007243 | −4 | 0.6 |
| 12 | 0.174836 | −2 | 0.61 | 0.007243 | −4 | 0.6 |
| 13 | 0.174836 | −2 | 0.61 | 0.007243 | −4 | 0.6 |
| 14 | 0.174836 | −2 | 0.61 | 0.007243 | −4 | 0.6 |
| 4 | 0.174836 | −2 | 0.61 | 0.007243 | −4 | 0.6 |
| 15 | 0.174836 | −2 | 0.61 | 0.007243 | −4 | 0.6 |
| 16 | 0.174836 | −2 | 0.61 | 0.007243 | −4 | 0.6 |
| 17 | 0.174836 | −2 | 0.61 | 0.007243 | −4 | 0.6 |
| 18 | 0.174836 | −2 | 0.61 | 0.007243 | −4 | 0.6 |
| 19 | 0.174836 | −2 | 0.61 | 0.007243 | −4 | 0.6 |
| 20 | 0.174836 | −2 | 0.61 | 0.007243 | −4 | 0.6 |

TABLE 4
Markers in CYP2C9 Associated with Better Vilazodone Response
Measured as Change of MADRS

| | | | Percent | | | Percent |
|---|---|---|---|---|---|---|
| | | Response | with | | Response | with |
| | | Difference | Marker | p | Difference | Marker |
| | p (all | (all | (all | (Cauc. | (Cauc. | (Cauc. |
| Marker | ethnic.) | ethnic.) | ethnic.) | only) | only) | only) |
| 1 | 0.00097 | −6.3 | 84 | 0.00202 | −5.7 | 81 |

TABLE 5
Markers in DRD3 Associated with Better Vilazodone Response
Measured as Change of MADRS

| | | | Percent | | | Percent |
|---|---|---|---|---|---|---|
| | | Response | with | | Response | with |
| | | Difference | Marker | p | Difference | Marker |
| | p (all | (all | (all | (Cauc. | (Cauc. | (Cauc. |
| Marker | ethnic.) | ethnic.) | ethnic.) | only) | only) | only) |
| 1 | 3.3E−05 | −8.1 | 85 | NA | NA | NA |
| 2 | 0.00015 | −7.6 | 86 | 0.00191 | −6.2 | 84 |
| 7 | 0.00015 | −7.6 | 86 | 0.00191 | −6.2 | 84 |
| 8 | 0.00015 | −7.6 | 86 | 0.00191 | −6.2 | 84 |
| 3 | 0.00035 | −7.6 | 88 | NA | NA | NA |
| 9 | 0.00035 | −7.6 | 88 | NA | NA | NA |
| 4 | 5.9E−05 | −8.1 | 87 | NA | NA | NA |
| 5 | 7.7E−05 | −7.7 | 85 | NA | NA | NA |
| 6 | 0.00045 | −7.6 | 89 | NA | NA | NA |
| 10 | 0.00045 | −7.6 | 89 | NA | NA | NA |

TABLE 6
Markers in FOS Associated with Better Vilazodone Response
Measured as Change of MADRS

| | | | Percent | | | Percent |
|---|---|---|---|---|---|---|
| | | Response | with | | Response | with |
| | | Difference | Marker | p | Difference | Marker |
| | p (all | (all | (all | (Cauc. | (Cauc. | (Cauc. |
| Marker | ethnic.) | ethnic.) | ethnic.) | only) | only) | only) |
| 1 | 0.00362 | −9.2 | 95 | NA | NA | NA |
| 2 | 0.00362 | −9.2 | 95 | 0.27338 | −1.6 | 45 |
| 3 | 0.02612 | −3.3 | 68 | 0.00143 | −4.9 | 67 |
| 4 | 0.02292 | −3.4 | 68 | 0.00114 | −5 | 68 |
| 5 | 0.00962 | −4.2 | 75 | 0.00024 | −6.2 | 77 |

TABLE 7
Markers in DTNBP1 Associated with Better Vilazodone Response
Measured as Change of MADRS

| | | Re- | | | | |
|---|---|---|---|---|---|---|
| | | sponse | Percent | | | Percent |
| | | Differ- | with | | Response | with |
| | | ence | Marker | | Difference | Marker |
| | p (all | (all | (all | p (Cauc. | (Cauc. | (Cauc. |
| Marker | ethnic.) | ethnic.) | ethnic.) | only) | only) | only) |
| 1 | 0.000018 | −6.4 | 31 | 0.000027 | −6.6 | 29 |
| 2 | 0.000031 | −6.1 | 32 | 0.000041 | −6.3 | 30 |
| 3 | 0.000009 | −6.6 | 31 | NA | NA | NA |
| 4 | 0.000019 | −6.4 | 31 | 0.000012 | −6.8 | 29 |
| 5 | 0.000024 | −6.3 | 31 | NA | NA | NA |
| 6 | 0.000016 | −6.4 | 32 | NA | NA | NA |
| 12 | 0.000016 | −6.4 | 32 | NA | NA | NA |
| 13 | 0.000016 | −6.4 | 32 | NA | NA | NA |
| 14 | 0.000016 | −6.4 | 32 | NA | NA | NA |
| 15 | 0.000016 | −6.4 | 32 | NA | NA | NA |
| 16 | 0.000016 | −6.4 | 32 | NA | NA | NA |
| 17 | 0.000016 | −6.4 | 32 | NA | NA | NA |
| 18 | 0.000016 | −6.4 | 32 | NA | NA | NA |
| 19 | 0.000016 | −6.4 | 32 | NA | NA | NA |
| 20 | 0.000016 | −6.4 | 32 | NA | NA | NA |
| 21 | 0.000016 | −6.4 | 32 | NA | NA | NA |
| 7 | 0.000011 | −6.5 | 31 | 0.00001 | −6.8 | 30 |
| 8 | 0.000026 | −6.1 | 35 | 0.00008 | −5.9 | 36 |
| 9 | 0.000258 | −5.4 | 34 | 0.001033 | −5 | 34 |
| 10 | 0.000014 | −6.8 | 32 | 0.000017 | −6.7 | 29 |
| 11 | 0.000459 | −6.6 | 16 | 0.000084 | −7.9 | 15 |
| 22 | 0.000459 | −6.6 | 16 | 0.000084 | −7.9 | 15 |
| 23 | 0.000459 | −6.6 | 16 | 0.000084 | −7.9 | 15 |
| 24 | 0.000459 | −6.6 | 16 | 0.000084 | −7.9 | 15 |
| 25 | 0.000459 | −6.6 | 16 | 0.000084 | −7.9 | 15 |
| 26 | 0.000459 | −6.6 | 16 | 0.000084 | −7.9 | 15 |
| 27 | 0.000459 | −6.6 | 16 | 0.000084 | −7.9 | 15 |
| 28 | 0.000459 | −6.6 | 16 | 0.000084 | −7.9 | 15 |
| 29 | 0.000459 | −6.6 | 16 | 0.000084 | −7.9 | 15 |
| 30 | 0.000459 | −6.6 | 16 | 0.000084 | −7.9 | 15 |
| 31 | 0.000459 | −6.6 | 16 | 0.000084 | −7.9 | 15 |
| 32 | 0.000459 | −6.6 | 16 | 0.000084 | −7.9 | 15 |
| 33 | 0.000459 | −6.6 | 16 | 0.000084 | −7.9 | 15 |
| 34 | 0.000459 | −6.6 | 16 | 0.000084 | −7.9 | 15 |
| 35 | 0.000459 | −6.6 | 16 | 0.000084 | −7.9 | 15 |
| 36 | 0.000459 | −6.6 | 16 | 0.000084 | −7.9 | 15 |

TABLE 8
Markers in GABRG3 Associated with Better Vilazodone Response
Measured as Change of MADRS

| | | | Percent | | | Percent |
|---|---|---|---|---|---|---|
| | | Response | with | | Response | with |
| | | Difference | Marker | p | Difference | Marker |
| | p (all | (all | (all | (Cauc. | (Cauc. | (Cauc. |
| Marker | ethnic.) | ethnic.) | ethnic.) | only) | only) | only) |
| 1 | 0.00143 | −6.8 | 12 | 0.00015 | −7.8 | 14 |
| 10 | 0.00143 | −6.8 | 12 | 0.00015 | −7.8 | 14 |
| 11 | 0.00143 | −6.8 | 12 | 0.00015 | −7.8 | 14 |
| 12 | 0.00143 | −6.8 | 12 | 0.00015 | −7.8 | 14 |
| 13 | 0.00143 | −6.8 | 12 | 0.00015 | −7.8 | 14 |
| 2 | 0.00236 | −5.4 | 19 | 0.00035 | −6.1 | 22 |
| 3 | 0.00831 | −3.7 | 42 | 0.0003 | −5.2 | 43 |
| 4 | 0.00829 | −3.8 | 40 | 0.00029 | −5.3 | 42 |
| 5 | 0.02916 | −3.1 | 55 | 0.0025 | −4.4 | 53 |
| 6 | 0.00657 | −6 | 11 | 0.00102 | −7 | 13 |
| 7 | 0.02867 | −3.2 | 34 | 0.00328 | −4.4 | 36 |
| 8 | 0.0107 | −3.7 | 61 | 0.00035 | −5.2 | 60 |
| 9 | 0.00365 | −4.7 | 24 | 0.00029 | −5.9 | 26 |

TABLE 9
Markers in GRIA4 Associated with Better Vilazodone Response
Measured as Change of MADRS

| | | Re- | | | | |
|---|---|---|---|---|---|---|
| | | sponse | Percent | | | Percent |
| | | differ- | with | | Response | with |
| | | ence | marker | | difference | marker |
| | p (all | (all | (all | p (Cauc. | (Cauc. | (Cauc. |
| Marker | ethnic.) | ethnic.) | ethnic.) | only) | only) | only) |
| 1 | 0.00068 | −8 | 90 | NA | NA | NA |
| 71 | 0.00068 | −8 | 90 | NA | NA | NA |
| 72 | 0.00068 | −8 | 90 | NA | NA | NA |
| 73 | 0.00068 | −8 | 90 | NA | NA | NA |
| 74 | 0.00068 | −8 | 90 | NA | NA | NA |
| 75 | 0.00068 | −8 | 90 | NA | NA | NA |
| 76 | 0.00068 | −8 | 90 | NA | NA | NA |
| 77 | 0.00068 | −8 | 90 | NA | NA | NA |
| 2 | 0.00016 | −12.7 | 96 | 0.000614 | −11.7 | 95 |
| 78 | 0.00016 | −12.7 | 96 | 0.000614 | −11.7 | 95 |
| 3 | 1.6E−05 | −12.8 | 94 | 0.000054 | −11.9 | 94 |
| 79 | 1.6E−05 | −12.8 | 94 | 0.000054 | −11.9 | 94 |
| 4 | 6.6E−05 | −12.5 | 95 | 0.000241 | −11.6 | 95 |
| 5 | 0.00248 | −5 | 77 | 0.000307 | −6.3 | 79 |
| 6 | 0.02065 | −5 | 88 | 0.00015 | −5.5 | 43 |
| 7 | 0.03314 | −4.7 | 89 | 0.000133 | −5.5 | 44 |
| 8 | 0.00138 | −7.4 | 90 | 0.000239 | −8.7 | 90 |
| 9 | 0.00105 | −7.3 | 89 | 0.000196 | −8.5 | 89 |
| 10 | 0.01395 | −3.8 | 70 | 0.001983 | −5.1 | 74 |
| 11 | 0.00618 | −4.1 | 68 | 0.000436 | −5.6 | 71 |
| 12 | 0.04535 | −5.8 | 94 | 0.003007 | −9.4 | 95 |
| 13 | 0.01153 | −4.8 | 83 | 0.00033 | −7.2 | 85 |
| 14 | 0.01517 | −3.8 | 73 | 0.000287 | −6.2 | 78 |
| 80 | 0.01517 | −3.8 | 73 | 0.000287 | −6.2 | 78 |
| 81 | 0.01517 | −3.8 | 73 | 0.000287 | −6.2 | 78 |
| 82 | 0.01517 | −3.8 | 73 | 0.000287 | −6.2 | 78 |
| 83 | 0.01517 | −3.8 | 73 | 0.000287 | −6.2 | 78 |
| 84 | 0.01517 | −3.8 | 73 | 0.000287 | −6.2 | 78 |
| 85 | 0.01517 | −3.8 | 73 | 0.000287 | −6.2 | 78 |
| 86 | 0.01517 | −3.8 | 73 | 0.000287 | −6.2 | 78 |
| 87 | 0.01517 | −3.8 | 73 | 0.000287 | −6.2 | 78 |
| 88 | 0.01517 | −3.8 | 73 | 0.000287 | −6.2 | 78 |
| 89 | 0.01517 | −3.8 | 73 | 0.000287 | −6.2 | 78 |
| 90 | 0.01517 | −3.8 | 73 | 0.000287 | −6.2 | 78 |
| 91 | 0.01517 | −3.8 | 73 | 0.000287 | −6.2 | 78 |
| 92 | 0.01517 | −3.8 | 73 | 0.000287 | −6.2 | 78 |
| 93 | 0.01517 | −3.8 | 73 | 0.000287 | −6.2 | 78 |
| 94 | 0.01517 | −3.8 | 73 | 0.000287 | −6.2 | 78 |
| 95 | 0.01517 | −3.8 | 73 | 0.000287 | −6.2 | 78 |
| 96 | 0.01517 | −3.8 | 73 | 0.000287 | −6.2 | 78 |
| 97 | 0.01517 | −3.8 | 73 | 0.000287 | −6.2 | 78 |
| 98 | 0.01517 | −3.8 | 73 | 0.000287 | −6.2 | 78 |
| 99 | 0.01517 | −3.8 | 73 | 0.000287 | −6.2 | 78 |
| 100 | 0.01517 | −3.8 | 73 | 0.000287 | −6.2 | 78 |
| 101 | 0.01517 | −3.8 | 73 | 0.000287 | −6.2 | 78 |
| 102 | 0.01517 | −3.8 | 73 | 0.000287 | −6.2 | 78 |
| 103 | 0.01517 | −3.8 | 73 | 0.000287 | −6.2 | 78 |
| 104 | 0.01517 | −3.8 | 73 | 0.000287 | −6.2 | 78 |
| 105 | 0.01517 | −3.8 | 73 | 0.000287 | −6.2 | 78 |
| 106 | 0.01517 | −3.8 | 73 | 0.000287 | −6.2 | 78 |
| 107 | 0.01517 | −3.8 | 73 | 0.000287 | −6.2 | 78 |
| 108 | 0.01517 | −3.8 | 73 | 0.000287 | −6.2 | 78 |
| 109 | 0.01517 | −3.8 | 73 | 0.000287 | −6.2 | 78 |
| 110 | 0.01517 | −3.8 | 73 | 0.000287 | −6.2 | 78 |
| 111 | 0.01517 | −3.8 | 73 | 0.000287 | −6.2 | 78 |
| 112 | 0.01517 | −3.8 | 73 | 0.000287 | −6.2 | 78 |
| 15 | 0.0068 | −4.3 | 74 | 0.000088 | −6.8 | 78 |
| 113 | 0.0068 | −4.3 | 74 | 0.000088 | −6.8 | 78 |
| 16 | 0.00367 | −4.6 | 73 | 0.000054 | −6.8 | 77 |
| 114 | 0.00367 | −4.6 | 73 | 0.000054 | −6.8 | 77 |
| 17 | 0.0137 | −3.8 | 69 | 0.000206 | −6 | 73 |
| 115 | 0.0137 | −3.8 | 69 | 0.000206 | −6 | 73 |
| 116 | 0.0137 | −3.8 | 69 | 0.000206 | −6 | 73 |
| 117 | 0.0137 | −3.8 | 69 | 0.000206 | −6 | 73 |
| 18 | 0.00227 | −5.7 | 83 | 0.00002 | −8.7 | 86 |
| 118 | 0.00227 | −5.7 | 83 | 0.00002 | −8.7 | 86 |
| 19 | 0.00459 | −4.4 | 72 | 0.000031 | −6.9 | 76 |
| 119 | 0.00459 | −4.4 | 72 | 0.000031 | −6.9 | 76 |
| 120 | 0.00459 | −4.4 | 72 | 0.000031 | −6.9 | 76 |
| 121 | 0.00459 | −4.4 | 72 | 0.000031 | −6.9 | 76 |
| 20 | 0.00527 | −4.3 | 71 | 0.000033 | −6.8 | 75 |
| 122 | 0.00527 | −4.3 | 71 | 0.000033 | −6.8 | 75 |
| 123 | 0.00527 | −4.3 | 71 | 0.000033 | −6.8 | 75 |
| 124 | 0.00527 | −4.3 | 71 | 0.000033 | −6.8 | 75 |
| 21 | 0.00566 | −4.3 | 72 | 0.000034 | −6.9 | 76 |
| 125 | 0.00566 | −4.3 | 72 | 0.000034 | −6.9 | 76 |
| 126 | 0.00566 | −4.3 | 72 | 0.000034 | −6.9 | 76 |
| 127 | 0.00566 | −4.3 | 72 | 0.000034 | −6.9 | 76 |
| 128 | 0.00566 | −4.3 | 72 | 0.000034 | −6.9 | 76 |
| 129 | 0.00566 | −4.3 | 72 | 0.000034 | −6.9 | 76 |
| 130 | 0.00566 | −4.3 | 72 | 0.000034 | −6.9 | 76 |
| 131 | 0.00566 | −4.3 | 72 | 0.000034 | −6.9 | 76 |
| 22 | 0.00233 | −4.8 | 73 | 0.000009 | −7.4 | 77 |
| 132 | 0.00233 | −4.8 | 73 | 0.000009 | −7.4 | 77 |
| 23 | 0.01057 | −3.9 | 70 | 0.000173 | −6.1 | 74 |
| 133 | 0.01057 | −3.9 | 70 | 0.000173 | −6.1 | 74 |
| 134 | 0.01057 | −3.9 | 70 | 0.000173 | −6.1 | 74 |
| 135 | 0.01057 | −3.9 | 70 | 0.000173 | −6.1 | 74 |
| 136 | 0.01057 | −3.9 | 70 | 0.000173 | −6.1 | 74 |
| 137 | 0.01057 | −3.9 | 70 | 0.000173 | −6.1 | 74 |
| 138 | 0.01057 | −3.9 | 70 | 0.000173 | −6.1 | 74 |
| 139 | 0.01057 | −3.9 | 70 | 0.000173 | −6.1 | 74 |
| 140 | 0.01057 | −3.9 | 70 | 0.000173 | −6.1 | 74 |
| 141 | 0.01057 | −3.9 | 70 | 0.000173 | −6.1 | 74 |
| 142 | 0.01057 | −3.9 | 70 | 0.000173 | −6.1 | 74 |
| 143 | 0.01057 | −3.9 | 70 | 0.000173 | −6.1 | 74 |
| 144 | 0.01057 | −3.9 | 70 | 0.000173 | −6.1 | 74 |
| 145 | 0.01057 | −3.9 | 70 | 0.000173 | −6.1 | 74 |
| 146 | 0.01057 | −3.9 | 70 | 0.000173 | −6.1 | 74 |
| 147 | 0.01057 | −3.9 | 70 | 0.000173 | −6.1 | 74 |
| 148 | 0.01057 | −3.9 | 70 | 0.000173 | −6.1 | 74 |
| 149 | 0.01057 | −3.9 | 70 | 0.000173 | −6.1 | 74 |
| 24 | 0.01159 | −3.9 | 72 | 0.000124 | −6.4 | 76 |
| 150 | 0.01159 | −3.9 | 72 | 0.000124 | −6.4 | 76 |
| 151 | 0.01159 | −3.9 | 72 | 0.000124 | −6.4 | 76 |
| 152 | 0.01159 | −3.9 | 72 | 0.000124 | −6.4 | 76 |
| 25 | 0.01242 | −3.9 | 73 | 0.000131 | −6.5 | 77 |
| 153 | 0.01242 | −3.9 | 73 | 0.000131 | −6.5 | 77 |
| 154 | 0.01242 | −3.9 | 73 | 0.000131 | −6.5 | 77 |
| 155 | 0.01242 | −3.9 | 73 | 0.000131 | −6.5 | 77 |
| 156 | 0.01242 | −3.9 | 73 | 0.000131 | −6.5 | 77 |
| 157 | 0.01242 | −3.9 | 73 | 0.000131 | −6.5 | 77 |
| 158 | 0.01242 | −3.9 | 73 | 0.000131 | −6.5 | 77 |
| 159 | 0.01242 | −3.9 | 73 | 0.000131 | −6.5 | 77 |
| 160 | 0.01242 | −3.9 | 73 | 0.000131 | −6.5 | 77 |
| 161 | 0.01242 | −3.9 | 73 | 0.000131 | −6.5 | 77 |
| 26 | 0.01439 | −3.4 | 50 | 0.000186 | −5.3 | 53 |
| 162 | 0.01439 | −3.4 | 50 | 0.000186 | −5.3 | 53 |
| 163 | 0.01439 | −3.4 | 50 | 0.000186 | −5.3 | 53 |
| 27 | 0.00529 | −3.9 | 54 | 0.000221 | −5.3 | 54 |
| 28 | 0.01391 | −3.5 | 50 | 0.00022 | −5.3 | 53 |
| 29 | 0.03894 | −4.1 | 85 | 0.000412 | −5.1 | 41 |
| 30 | 0.03593 | −3.8 | 81 | 0.003874 | −5.4 | 81 |
| 164 | 0.03593 | −3.8 | 81 | 0.003874 | −5.4 | 81 |
| 165 | 0.03593 | −3.8 | 81 | 0.003874 | −5.4 | 81 |
| 166 | 0.03593 | −3.8 | 81 | 0.003874 | −5.4 | 81 |
| 167 | 0.03593 | −3.8 | 81 | 0.003874 | −5.4 | 81 |
| 168 | 0.03593 | −3.8 | 81 | 0.003874 | −5.4 | 81 |
| 169 | 0.03593 | −3.8 | 81 | 0.003874 | −5.4 | 81 |
| 170 | 0.03593 | −3.8 | 81 | 0.003874 | −5.4 | 81 |
| 171 | 0.03593 | −3.8 | 81 | 0.003874 | −5.4 | 81 |
| 172 | 0.03593 | −3.8 | 81 | 0.003874 | −5.4 | 81 |
| 173 | 0.03593 | −3.8 | 81 | 0.003874 | −5.4 | 81 |
| 174 | 0.03593 | −3.8 | 81 | 0.003874 | −5.4 | 81 |
| 175 | 0.03593 | −3.8 | 81 | 0.003874 | −5.4 | 81 |
| 176 | 0.03593 | −3.8 | 81 | 0.003874 | −5.4 | 81 |
| 177 | 0.03593 | −3.8 | 81 | 0.003874 | −5.4 | 81 |
| 178 | 0.03593 | −3.8 | 81 | 0.003874 | −5.4 | 81 |
| 179 | 0.03593 | −3.8 | 81 | 0.003874 | −5.4 | 81 |
| 180 | 0.03593 | −3.8 | 81 | 0.003874 | −5.4 | 81 |
| 181 | 0.03593 | −3.8 | 81 | 0.003874 | −5.4 | 81 |
| 182 | 0.03593 | −3.8 | 81 | 0.003874 | −5.4 | 81 |
| 31 | 0.04924 | −2.8 | 40 | 0.00037 | −5.2 | 42 |
| 183 | 0.04924 | −2.8 | 40 | 0.00037 | −5.2 | 42 |
| 184 | 0.04924 | −2.8 | 40 | 0.00037 | −5.2 | 42 |
| 32 | 0.00824 | −4.4 | 77 | 0.000517 | −6 | 78 |
| 33 | 0.01345 | −4.2 | 78 | 0.000442 | −6.5 | 81 |
| 34 | 0.01111 | −4 | 73 | 0.00039 | −6 | 77 |
| 35 | 0.01079 | −3.9 | 69 | 0.000321 | −5.7 | 72 |
| 185 | 0.01079 | −3.9 | 69 | 0.000321 | −5.7 | 72 |
| 36 | 0.01111 | −4 | 73 | 0.00039 | −6 | 77 |
| 37 | 0.00755 | −4.1 | 70 | 0.00016 | −6.1 | 74 |
| 186 | 0.00755 | −4.1 | 70 | 0.00016 | −6.1 | 74 |
| 187 | 0.00755 | −4.1 | 70 | 0.00016 | −6.1 | 74 |
| 188 | 0.00755 | −4.1 | 70 | 0.00016 | −6.1 | 74 |
| 189 | 0.00755 | −4.1 | 70 | 0.00016 | −6.1 | 74 |
| 190 | 0.00755 | −4.1 | 70 | 0.00016 | −6.1 | 74 |
| 191 | 0.00755 | −4.1 | 70 | 0.00016 | −6.1 | 74 |
| 192 | 0.00755 | −4.1 | 70 | 0.00016 | −6.1 | 74 |
| 193 | 0.00755 | −4.1 | 70 | 0.00016 | −6.1 | 74 |
| 194 | 0.00755 | −4.1 | 70 | 0.00016 | −6.1 | 74 |
| 195 | 0.00755 | −4.1 | 70 | 0.00016 | −6.1 | 74 |
| 38 | 0.00755 | −4.1 | 70 | 0.00016 | −6.1 | 74 |
| 39 | 0.01414 | −3.8 | 72 | 0.000366 | −6 | 76 |
| 196 | 0.01414 | −3.8 | 72 | 0.000366 | −6 | 76 |
| 40 | 0.00835 | −4.1 | 71 | 0.000165 | −6.2 | 75 |
| 197 | 0.00835 | −4.1 | 71 | 0.000165 | −6.2 | 75 |
| 41 | 0.00645 | −4.3 | 73 | 0.000176 | −6.3 | 76 |
| 42 | 0.00645 | −4.3 | 73 | 0.000176 | −6.3 | 76 |
| 43 | 0.00546 | −6 | 88 | 0.002356 | −7 | 89 |
| 198 | 0.00546 | −6 | 88 | 0.002356 | −7 | 89 |
| 199 | 0.00546 | −6 | 88 | 0.002356 | −7 | 89 |
| 200 | 0.00546 | −6 | 88 | 0.002356 | −7 | 89 |
| 201 | 0.00546 | −6 | 88 | 0.002356 | −7 | 89 |
| 202 | 0.00546 | −6 | 88 | 0.002356 | −7 | 89 |
| 203 | 0.00546 | −6 | 88 | 0.002356 | −7 | 89 |
| 204 | 0.00546 | −6 | 88 | 0.002356 | −7 | 89 |
| 205 | 0.00546 | −6 | 88 | 0.002356 | −7 | 89 |
| 206 | 0.00546 | −6 | 88 | 0.002356 | −7 | 89 |
| 207 | 0.00546 | −6 | 88 | 0.002356 | −7 | 89 |
| 208 | 0.00546 | −6 | 88 | 0.002356 | −7 | 89 |
| 209 | 0.00546 | −6 | 88 | 0.002356 | −7 | 89 |
| 210 | 0.00546 | −6 | 88 | 0.002356 | −7 | 89 |
| 211 | 0.00546 | −6 | 88 | 0.002356 | −7 | 89 |
| 212 | 0.00546 | −6 | 88 | 0.002356 | −7 | 89 |
| 213 | 0.00546 | −6 | 88 | 0.002356 | −7 | 89 |
| 214 | 0.00546 | −6 | 88 | 0.002356 | −7 | 89 |
| 215 | 0.00546 | −6 | 88 | 0.002356 | −7 | 89 |
| 216 | 0.00546 | −6 | 88 | 0.002356 | −7 | 89 |
| 217 | 0.00546 | −6 | 88 | 0.002356 | −7 | 89 |
| 218 | 0.00546 | −6 | 88 | 0.002356 | −7 | 89 |
| 219 | 0.00546 | −6 | 88 | 0.002356 | −7 | 89 |
| 220 | 0.00546 | −6 | 88 | 0.002356 | −7 | 89 |
| 221 | 0.00546 | −6 | 88 | 0.002356 | −7 | 89 |
| 44 | 0.0043 | −4.1 | 62 | 0.000136 | −5.7 | 64 |
| 45 | 0.03894 | −4.1 | 85 | 0.000412 | −5.1 | 41 |
| 46 | 0.01439 | −3.4 | 50 | 0.000186 | −5.3 | 53 |
| 47 | 0.02194 | −3.5 | 70 | 0.002551 | −4.8 | 71 |
| 48 | 0.04924 | −2.8 | 40 | 0.00037 | −5.2 | 42 |
| 49 | 0.00281 | −5 | 78 | 0.000065 | −7.1 | 80 |
| 222 | 0.00281 | −5 | 78 | 0.000065 | −7.1 | 80 |
| 223 | 0.00281 | −5 | 78 | 0.000065 | −7.1 | 80 |
| 50 | 0.00076 | −5.6 | 77 | 0.000071 | −6.9 | 78 |
| 224 | 0.00076 | −5.6 | 77 | 0.000071 | −6.9 | 78 |
| 51 | 0.00259 | −5 | 77 | 0.000208 | −6.3 | 78 |
| 225 | 0.00259 | −5 | 77 | 0.000208 | −6.3 | 78 |
| 52 | 0.00339 | −5.9 | 86 | 0.000148 | −8.2 | 88 |
| 226 | 0.00339 | −5.9 | 86 | 0.000148 | −8.2 | 88 |
| 227 | 0.00339 | −5.9 | 86 | 0.000148 | −8.2 | 88 |
| 53 | 0.00417 | −4.8 | 78 | 0.00007 | −6.9 | 79 |
| 228 | 0.00417 | −4.8 | 78 | 0.00007 | −6.9 | 79 |
| 229 | 0.00417 | −4.8 | 78 | 0.00007 | −6.9 | 79 |
| 230 | 0.00417 | −4.8 | 78 | 0.00007 | −6.9 | 79 |
| 231 | 0.00417 | −4.8 | 78 | 0.00007 | −6.9 | 79 |
| 232 | 0.00417 | −4.8 | 78 | 0.00007 | −6.9 | 79 |
| 233 | 0.00417 | −4.8 | 78 | 0.00007 | −6.9 | 79 |
| 234 | 0.00417 | −4.8 | 78 | 0.00007 | −6.9 | 79 |
| 235 | 0.00417 | −4.8 | 78 | 0.00007 | −6.9 | 79 |
| 236 | 0.00417 | −4.8 | 78 | 0.00007 | −6.9 | 79 |
| 237 | 0.00417 | −4.8 | 78 | 0.00007 | −6.9 | 79 |
| 238 | 0.00417 | −4.8 | 78 | 0.00007 | −6.9 | 79 |
| 54 | 0.002 | −6.1 | 85 | 0.000078 | −8.3 | 87 |
| 239 | 0.002 | −6.1 | 85 | 0.000078 | −8.3 | 87 |
| 240 | 0.002 | −6.1 | 85 | 0.000078 | −8.3 | 87 |
| 55 | 0.0015 | −5.4 | 78 | 0.000018 | −7.6 | 80 |
| 241 | 0.0015 | −5.4 | 78 | 0.000018 | −7.6 | 80 |
| 242 | 0.0015 | −5.4 | 78 | 0.000018 | −7.6 | 80 |
| 56 | 0.00093 | −5.6 | 78 | 0.000063 | −7 | 79 |
| 243 | 0.00093 | −5.6 | 78 | 0.000063 | −7 | 79 |
| 57 | 0.00272 | −5 | 78 | 0.000218 | −6.4 | 78 |
| 244 | 0.00272 | −5 | 78 | 0.000218 | −6.4 | 78 |
| 245 | 0.00272 | −5 | 78 | 0.000218 | −6.4 | 78 |
| 246 | 0.00272 | −5 | 78 | 0.000218 | −6.4 | 78 |
| 247 | 0.00272 | −5 | 78 | 0.000218 | −6.4 | 78 |
| 248 | 0.00272 | −5 | 78 | 0.000218 | −6.4 | 78 |
| 249 | 0.00272 | −5 | 78 | 0.000218 | −6.4 | 78 |
| 250 | 0.00272 | −5 | 78 | 0.000218 | −6.4 | 78 |
| 251 | 0.00272 | −5 | 78 | 0.000218 | −6.4 | 78 |
| 252 | 0.00272 | −5 | 78 | 0.000218 | −6.4 | 78 |
| 253 | 0.00272 | −5 | 78 | 0.000218 | −6.4 | 78 |
| 254 | 0.00272 | −5 | 78 | 0.000218 | −6.4 | 78 |
| 58 | 0.00124 | −5.3 | 77 | 0.000108 | −6.6 | 78 |
| 255 | 0.00124 | −5.3 | 77 | 0.000108 | −6.6 | 78 |
| 256 | 0.00124 | −5.3 | 77 | 0.000108 | −6.6 | 78 |
| 257 | 0.00124 | −5.3 | 77 | 0.000108 | −6.6 | 78 |
| 59 | 0.00093 | −5.6 | 78 | 0.000063 | −7 | 79 |
| 60 | 0.01072 | −4.5 | 80 | 0.000375 | −6.4 | 81 |
| 258 | 0.01072 | −4.5 | 80 | 0.000375 | −6.4 | 81 |
| 259 | 0.01072 | −4.5 | 80 | 0.000375 | −6.4 | 81 |
| 260 | 0.01072 | −4.5 | 80 | 0.000375 | −6.4 | 81 |
| 261 | 0.01072 | −4.5 | 80 | 0.000375 | −6.4 | 81 |
| 262 | 0.01072 | −4.5 | 80 | 0.000375 | −6.4 | 81 |
| 61 | 0.00184 | −5.2 | 78 | 0.000228 | −6.5 | 79 |
| 263 | 0.00184 | −5.2 | 78 | 0.000228 | −6.5 | 79 |
| 264 | 0.00184 | −5.2 | 78 | 0.000228 | −6.5 | 79 |
| 62 | 0.00518 | −4.6 | 76 | 0.000119 | −6.6 | 78 |
| 265 | 0.00518 | −4.6 | 76 | 0.000119 | −6.6 | 78 |
| 266 | 0.00518 | −4.6 | 76 | 0.000119 | −6.6 | 78 |
| 267 | 0.00518 | −4.6 | 76 | 0.000119 | −6.6 | 78 |
| 268 | 0.00518 | −4.6 | 76 | 0.000119 | −6.6 | 78 |
| 269 | 0.00518 | −4.6 | 76 | 0.000119 | −6.6 | 78 |
| 270 | 0.00518 | −4.6 | 76 | 0.000119 | −6.6 | 78 |
| 271 | 0.00518 | −4.6 | 76 | 0.000119 | −6.6 | 78 |
| 272 | 0.00518 | −4.6 | 76 | 0.000119 | −6.6 | 78 |
| 273 | 0.00518 | −4.6 | 76 | 0.000119 | −6.6 | 78 |
| 274 | 0.00518 | −4.6 | 76 | 0.000119 | −6.6 | 78 |
| 275 | 0.00518 | −4.6 | 76 | 0.000119 | −6.6 | 78 |
| 276 | 0.00518 | −4.6 | 76 | 0.000119 | −6.6 | 78 |
| 277 | 0.00518 | −4.6 | 76 | 0.000119 | −6.6 | 78 |
| 278 | 0.00518 | −4.6 | 76 | 0.000119 | −6.6 | 78 |
| 279 | 0.00518 | −4.6 | 76 | 0.000119 | −6.6 | 78 |
| 280 | 0.00518 | −4.6 | 76 | 0.000119 | −6.6 | 78 |
| 281 | 0.00518 | −4.6 | 76 | 0.000119 | −6.6 | 78 |
| 282 | 0.00518 | −4.6 | 76 | 0.000119 | −6.6 | 78 |
| 283 | 0.00518 | −4.6 | 76 | 0.000119 | −6.6 | 78 |
| 284 | 0.00518 | −4.6 | 76 | 0.000119 | −6.6 | 78 |
| 285 | 0.00518 | −4.6 | 76 | 0.000119 | −6.6 | 78 |
| 63 | 0.00547 | −4.6 | 77 | 0.000123 | −6.6 | 78 |
| 286 | 0.00547 | −4.6 | 77 | 0.000123 | −6.6 | 78 |
| 287 | 0.00547 | −4.6 | 77 | 0.000123 | −6.6 | 78 |
| 288 | 0.00547 | −4.6 | 77 | 0.000123 | −6.6 | 78 |
| 289 | 0.00547 | −4.6 | 77 | 0.000123 | −6.6 | 78 |
| 64 | 0.00209 | −5 | 76 | 0.000224 | −6.2 | 77 |
| 290 | 0.00209 | −5 | 76 | 0.000224 | −6.2 | 77 |
| 65 | 0.00345 | −5 | 78 | 0.000504 | −6.2 | 80 |
| 291 | 0.00345 | −5 | 78 | 0.000504 | −6.2 | 80 |
| 292 | 0.00345 | −5 | 78 | 0.000504 | −6.2 | 80 |
| 66 | 0.0022 | −5 | 76 | 0.000236 | −6.3 | 78 |
| 293 | 0.0022 | −5 | 76 | 0.000236 | −6.3 | 78 |
| 67 | 0.0022 | −5 | 76 | 0.000236 | −6.3 | 78 |
| 68 | 0.01185 | −3.5 | 50 | 0.000148 | −5.4 | 53 |
| 294 | 0.01185 | −3.5 | 50 | 0.000148 | −5.4 | 53 |
| 69 | 0.01178 | −4.2 | 77 | 0.000417 | −6.1 | 78 |
| 295 | 0.01178 | −4.2 | 77 | 0.000417 | −6.1 | 78 |
| 296 | 0.01178 | −4.2 | 77 | 0.000417 | −6.1 | 78 |
| 297 | 0.01178 | −4.2 | 77 | 0.000417 | −6.1 | 78 |
| 298 | 0.01178 | −4.2 | 77 | 0.000417 | −6.1 | 78 |
| 299 | 0.01178 | −4.2 | 77 | 0.000417 | −6.1 | 78 |
| 300 | 0.01178 | −4.2 | 77 | 0.000417 | −6.1 | 78 |
| 301 | 0.01178 | −4.2 | 77 | 0.000417 | −6.1 | 78 |
| 302 | 0.01178 | −4.2 | 77 | 0.000417 | −6.1 | 78 |
| 303 | 0.01178 | −4.2 | 77 | 0.000417 | −6.1 | 78 |
| 304 | 0.01178 | −4.2 | 77 | 0.000417 | −6.1 | 78 |
| 305 | 0.01178 | −4.2 | 77 | 0.000417 | −6.1 | 78 |
| 306 | 0.01178 | −4.2 | 77 | 0.000417 | −6.1 | 78 |
| 307 | 0.01178 | −4.2 | 77 | 0.000417 | −6.1 | 78 |
| 308 | 0.01178 | −4.2 | 77 | 0.000417 | −6.1 | 78 |
| 309 | 0.01178 | −4.2 | 77 | 0.000417 | −6.1 | 78 |
| 310 | 0.01178 | −4.2 | 77 | 0.000417 | −6.1 | 78 |
| 311 | 0.01178 | −4.2 | 77 | 0.000417 | −6.1 | 78 |
| 312 | 0.01178 | −4.2 | 77 | 0.000417 | −6.1 | 78 |
| 313 | 0.01178 | −4.2 | 77 | 0.000417 | −6.1 | 78 |
| 314 | 0.01178 | −4.2 | 77 | 0.000417 | −6.1 | 78 |
| 315 | 0.01178 | −4.2 | 77 | 0.000417 | −6.1 | 78 |
| 316 | 0.01178 | −4.2 | 77 | 0.000417 | −6.1 | 78 |
| 317 | 0.01178 | −4.2 | 77 | 0.000417 | −6.1 | 78 |
| 318 | 0.01178 | −4.2 | 77 | 0.000417 | −6.1 | 78 |
| 319 | 0.01178 | −4.2 | 77 | 0.000417 | −6.1 | 78 |
| 320 | 0.01178 | −4.2 | 77 | 0.000417 | −6.1 | 78 |
| 70 | 0.01247 | −4.2 | 78 | 0.000435 | −6.2 | 79 |
| 321 | 0.01247 | −4.2 | 78 | 0.000435 | −6.2 | 79 |
| 322 | 0.01247 | −4.2 | 78 | 0.000435 | −6.2 | 79 |
| 323 | 0.01247 | −4.2 | 78 | 0.000435 | −6.2 | 79 |
| 324 | 0.01247 | −4.2 | 78 | 0.000435 | −6.2 | 79 |

TABLE 10
Markers in LAMA4 Associated with Better Vilazodone Response
Measured as Change of MADRS

| | | | Percent | | | Percent |
|---|---|---|---|---|---|---|
| | | Response | with | | Response | with |
| | | difference | marker | | difference | marker |
| | p (all | (all | (all | p (Cauc. | (Cauc. | (Cauc. |
| Marker | ethnic.) | ethnic.) | ethnic.) | only) | only) | only) |
| 1 | 0.00076 | −7.2 | 88 | 0.00039 | −7.2 | 85 |
| 2 | 0.00043 | −7.2 | 87 | 0.000113 | −7.4 | 84 |
| 3 | 0.00051 | −5.9 | 78 | 0.000018 | −7.1 | 76 |
| 4 | 0.00014 | −6.7 | 81 | 0.000016 | −7.4 | 78 |
| 5 | 0.00049 | −5.3 | 71 | 0.000118 | −5.9 | 67 |
| 6 | 0.00525 | −5.3 | 84 | 0.000051 | −7.8 | 84 |
| 7 | 0.00741 | −4.5 | 77 | 0.000146 | −6.4 | 77 |
| 8 | 0.00703 | −6.8 | 92 | 0.002316 | −7.6 | 91 |
| 9 | 0.00278 | −4.5 | 69 | 0.001053 | −5 | 66 |
| 10 | 0.001 | −6.1 | 83 | 0.000021 | −8 | 83 |
| 11 | 0.38868 | −1.3 | 71 | 0.000095 | −13.2 | 95 |

TABLE 11
Markers in MAPK1 Associated with Better Vilazodone Response
Measured as Change of MADRS

| | | | Percent | | | Percent |
|---|---|---|---|---|---|---|
| | | Response | with | | Response | with |
| | | difference | marker | | difference | marker |
| | p (all | (all | (all | p (Cauc. | (Cauc. | (Cauc. |
| Marker | ethnic.) | ethnic.) | ethnic.) | only) | only) | only) |
| 1 | 0.00436 | −4 | 42 | 0.004241 | −4.1 | 47 |
| 2 | 0.00331 | −4.2 | 61 | 0.007552 | −4 | 64 |
| 3 | 0.00073 | −4.8 | 41 | 0.00162 | −4.6 | 44 |
| 4 | 0.00406 | −4.1 | 39 | 0.002776 | −4.4 | 43 |
| 5 | 0.00456 | −4.1 | 38 | 0.003404 | −4.3 | 42 |
| 9 | 0.00456 | −4.1 | 38 | 0.003404 | −4.3 | 42 |
| 10 | 0.00456 | −4.1 | 38 | 0.003404 | −4.3 | 42 |
| 11 | 0.00456 | −4.1 | 38 | 0.003404 | −4.3 | 42 |
| 12 | 0.00456 | −4.1 | 38 | 0.003404 | −4.3 | 42 |
| 13 | 0.00456 | −4.1 | 38 | 0.003404 | −4.3 | 42 |
| 14 | 0.00456 | −4.1 | 38 | 0.003404 | −4.3 | 42 |
| 15 | 0.00456 | −4.1 | 38 | 0.003404 | −4.3 | 42 |
| 16 | 0.00456 | −4.1 | 38 | 0.003404 | −4.3 | 42 |
| 17 | 0.00456 | −4.1 | 38 | 0.003404 | −4.3 | 42 |
| 18 | 0.00456 | −4.1 | 38 | 0.003404 | −4.3 | 42 |
| 6 | 0.02308 | −3.7 | 75 | 0.000998 | −5.7 | 78 |
| 7 | 0.00476 | −4.2 | 33 | 0.001246 | −4.8 | 37 |
| 8 | 0.00528 | −4.2 | 32 | 0.001524 | −4.7 | 36 |
| 19 | 0.00528 | −4.2 | 32 | 0.001524 | −4.7 | 36 |
| 20 | 0.00528 | −4.2 | 32 | 0.001524 | −4.7 | 36 |
| 21 | 0.00528 | −4.2 | 32 | 0.001524 | −4.7 | 36 |
| 22 | 0.00528 | −4.2 | 32 | 0.001524 | −4.7 | 36 |
| 23 | 0.00528 | −4.2 | 32 | 0.001524 | −4.7 | 36 |
| 24 | 0.00528 | −4.2 | 32 | 0.001524 | −4.7 | 36 |
| 25 | 0.00528 | −4.2 | 32 | 0.001524 | −4.7 | 36 |
| 26 | 0.00528 | −4.2 | 32 | 0.001524 | −4.7 | 36 |
| 27 | 0.00528 | −4.2 | 32 | 0.001524 | −4.7 | 36 |
| 28 | 0.00528 | −4.2 | 32 | 0.001524 | −4.7 | 36 |

TABLE 12
Markers in NPY1R Associated with Better Vilazodone Response
Measured as Change of MADRS

| | | Re- | | | | |
|---|---|---|---|---|---|---|
| | | sponse | Percent | | | Percent |
| | | differ- | with | | Response | with |
| | | ence | marker | | difference | marker |
| | p (all | (all | (all | p (Cauc. | (Cauc. | (Cauc. |
| Marker | ethnic.) | ethnic.) | ethnic.) | only) | only) | only) |
| 1 | 0.000998 | −4.7 | 41 | NA | NA | NA |
| 2 | 0.001864 | −4.4 | 44 | 0.002198 | −4.4 | 44 |
| 3 | 0.002751 | −4.2 | 53 | NA | NA | NA |
| 4 | 0.001163 | −4.6 | 41 | 0.002419 | −4.4 | 45 |
| 5 | 0.000729 | −4.7 | 48 | 0.001999 | −4.5 | 47 |
| 6 | 0.001295 | −4.5 | 45 | 0.001294 | −4.6 | 46 |
| 7 | 0.002129 | −4.3 | 45 | NA | NA | NA |
| 8 | 0.002978 | −4.2 | 59 | 0.024841 | −3.3 | 58 |
| 9 | 0.002932 | −4.2 | 52 | 0.006152 | −4 | 49 |
| 10 | 0.009254 | −3.8 | 62 | 0.055871 | −2.8 | 60 |
| 11 | 0.007104 | −3.8 | 47 | 0.006843 | −3.9 | 46 |
| 12 | 0.020973 | −3.3 | 46 | 0.007407 | −3.9 | 47 |
| 13 | 0.009157 | −3.7 | 52 | 0.006152 | −4 | 49 |
| 14 | 0.005079 | −3.9 | 48 | 0.004221 | −4.1 | 47 |

TABLE 13
Markers in OPRD1 Associated with Better Vilazodone Response
Measured as Change of MADRS

| | | Re- | | | | |
|---|---|---|---|---|---|---|
| | | sponse | Percent | | | Percent |
| | | differ- | with | | | with |
| | | ence | marker | p | Response | marker |
| | p (all | (all | (all | (Cauc. | difference | (Cauc. |
| Marker | ethnic.) | ethnic.) | ethnic.) | only) | (Cauc. only) | only) |
| 1 | 0.00049 | −5.3 | 30 | 7.2E−05 | −6.1 | 30 |
| 2 | 0.00055 | −5.5 | 74 | 0.00057 | −5.7 | 74 |
| 3 | 0.00026 | −7.4 | 13 | 0.00026 | −7.7 | 13 |
| 4 | 0.0004 | −7.7 | 11 | 0.0001 | −8.4 | 12 |
| 13 | 0.0004 | −7.7 | 11 | 0.0001 | −8.4 | 12 |
| 14 | 0.0004 | −7.7 | 11 | 0.0001 | −8.4 | 12 |
| 15 | 0.0004 | −7.7 | 11 | 0.0001 | −8.4 | 12 |
| 16 | 0.0004 | −7.7 | 11 | 0.0001 | −8.4 | 12 |
| 5 | 0.00021 | −12.5 | 4 | NA | NA | NA |
| 17 | 0.00021 | −12.5 | 4 | NA | NA | NA |
| 6 | 0.01277 | −4.2 | 78 | 0.00025 | −7.9 | 88 |
| 7 | 0.01368 | −3.5 | 41 | 0.00068 | −5 | 38 |
| 8 | 0.00466 | −4.5 | 26 | 0.00024 | −6.1 | 25 |
| 9 | 0.01637 | −5.3 | 11 | 0.00017 | −8.6 | 11 |
| 18 | 0.01637 | −5.3 | 11 | 0.00017 | −8.6 | 11 |
| 19 | 0.01637 | −5.3 | 11 | 0.00017 | −8.6 | 11 |
| 20 | 0.01637 | −5.3 | 11 | 0.00017 | −8.6 | 11 |
| 21 | 0.01637 | −5.3 | 11 | 0.00017 | −8.6 | 11 |
| 10 | 0.01075 | −4.3 | 78 | 0.00015 | −8.2 | 88 |
| 11 | 0.09967 | −2.4 | 59 | 0.00017 | −7.3 | 16 |
| 22 | 0.09967 | −2.4 | 59 | 0.00017 | −7.3 | 16 |
| 23 | 0.09967 | −2.4 | 59 | 0.00017 | −7.3 | 16 |
| 24 | 0.09967 | −2.4 | 59 | 0.00017 | −7.3 | 16 |
| 25 | 0.09967 | −2.4 | 59 | 0.00017 | −7.3 | 16 |
| 26 | 0.09967 | −2.4 | 59 | 0.00017 | −7.3 | 16 |
| 12 | 0.00157 | −4.6 | 34 | 3.6E−05 | −6.3 | 31 |

TABLE 14
Markers in OPRM1 Associated with Better Vilazodone Response
Measured as Change of MADRS

| | | Re- | | | | |
|---|---|---|---|---|---|---|
| | | sponse | Percent | | | Percent |
| | | differ- | with | | Response | with |
| | | ence | marker | | difference | marker |
| | p (all | (all | (all | p (Cauc. | (Cauc. | (Cauc. |
| Marker | ethnic.) | ethnic.) | ethnic.) | only) | only) | only) |
| 1 | 0.000063 | −10 | 92 | 0.015015 | −6.9 | 93 |
| 30 | 0.000063 | −10 | 92 | 0.015015 | −6.9 | 93 |
| 31 | 0.000063 | −10 | 92 | 0.015015 | −6.9 | 93 |
| 32 | 0.000063 | −10 | 92 | 0.015015 | −6.9 | 93 |
| 33 | 0.000063 | −10 | 92 | 0.015015 | −6.9 | 93 |
| 34 | 0.000063 | −10 | 92 | 0.015015 | −6.9 | 93 |
| 35 | 0.000063 | −10 | 92 | 0.015015 | −6.9 | 93 |
| 36 | 0.000063 | −10 | 92 | 0.015015 | −6.9 | 93 |
| 37 | 0.000063 | −10 | 92 | 0.015015 | −6.9 | 93 |
| 38 | 0.000063 | −10 | 92 | 0.015015 | −6.9 | 93 |
| 39 | 0.000063 | −10 | 92 | 0.015015 | −6.9 | 93 |
| 40 | 0.000063 | −10 | 92 | 0.015015 | −6.9 | 93 |
| 41 | 0.000063 | −10 | 92 | 0.015015 | −6.9 | 93 |
| 42 | 0.000063 | −10 | 92 | 0.015015 | −6.9 | 93 |
| 43 | 0.000063 | −10 | 92 | 0.015015 | −6.9 | 93 |
| 44 | 0.000063 | −10 | 92 | 0.015015 | −6.9 | 93 |
| 45 | 0.000063 | −10 | 92 | 0.015015 | −6.9 | 93 |
| 46 | 0.000063 | −10 | 92 | 0.015015 | −6.9 | 93 |
| 47 | 0.000063 | −10 | 92 | 0.015015 | −6.9 | 93 |
| 48 | 0.000063 | −10 | 92 | 0.015015 | −6.9 | 93 |
| 49 | 0.000063 | −10 | 92 | 0.015015 | −6.9 | 93 |
| 50 | 0.000063 | −10 | 92 | 0.015015 | −6.9 | 93 |
| 51 | 0.000063 | −10 | 92 | 0.015015 | −6.9 | 93 |
| 52 | 0.000063 | −10 | 92 | 0.015015 | −6.9 | 93 |
| 53 | 0.000063 | −10 | 92 | 0.015015 | −6.9 | 93 |
| 54 | 0.000063 | −10 | 92 | 0.015015 | −6.9 | 93 |
| 55 | 0.000063 | −10 | 92 | 0.015015 | −6.9 | 93 |
| 56 | 0.000063 | −10 | 92 | 0.015015 | −6.9 | 93 |
| 57 | 0.000063 | −10 | 92 | 0.015015 | −6.9 | 93 |
| 58 | 0.000063 | −10 | 92 | 0.015015 | −6.9 | 93 |
| 59 | 0.000063 | −10 | 92 | 0.015015 | −6.9 | 93 |
| 60 | 0.000063 | −10 | 92 | 0.015015 | −6.9 | 93 |
| 61 | 0.000063 | −10 | 92 | 0.015015 | −6.9 | 93 |
| 62 | 0.000063 | −10 | 92 | 0.015015 | −6.9 | 93 |
| 63 | 0.000063 | −10 | 92 | 0.015015 | −6.9 | 93 |
| 64 | 0.000063 | −10 | 92 | 0.015015 | −6.9 | 93 |
| 65 | 0.000063 | −10 | 92 | 0.015015 | −6.9 | 93 |
| 66 | 0.000063 | −10 | 92 | 0.015015 | −6.9 | 93 |
| 67 | 0.000063 | −10 | 92 | 0.015015 | −6.9 | 93 |
| 68 | 0.000063 | −10 | 92 | 0.015015 | −6.9 | 93 |
| 69 | 0.000063 | −10 | 92 | 0.015015 | −6.9 | 93 |
| 70 | 0.000063 | −10 | 92 | 0.015015 | −6.9 | 93 |
| 71 | 0.000063 | −10 | 92 | 0.015015 | −6.9 | 93 |
| 72 | 0.000063 | −10 | 92 | 0.015015 | −6.9 | 93 |
| 73 | 0.000063 | −10 | 92 | 0.015015 | −6.9 | 93 |
| 74 | 0.000063 | −10 | 92 | 0.015015 | −6.9 | 93 |
| 75 | 0.000063 | −10 | 92 | 0.015015 | −6.9 | 93 |
| 76 | 0.000063 | −10 | 92 | 0.015015 | −6.9 | 93 |
| 2 | 0.000015 | −6 | 44 | 0.000012 | −6.3 | 40 |
| 77 | 0.000015 | −6 | 44 | 0.000012 | −6.3 | 40 |
| 78 | 0.000015 | −6 | 44 | 0.000012 | −6.3 | 40 |
| 3 | 0.000004 | −6.3 | 45 | NA | NA | NA |
| 79 | 0.000004 | −6.3 | 45 | NA | NA | NA |
| 80 | 0.000004 | −6.3 | 45 | NA | NA | NA |
| 81 | 0.000004 | −6.3 | 45 | NA | NA | NA |
| 82 | 0.000004 | −6.3 | 45 | NA | NA | NA |
| 83 | 0.000004 | −6.3 | 45 | NA | NA | NA |
| 84 | 0.000004 | −6.3 | 45 | NA | NA | NA |
| 85 | 0.000004 | −6.3 | 45 | NA | NA | NA |
| 86 | 0.000004 | −6.3 | 45 | NA | NA | NA |
| 87 | 0.000004 | −6.3 | 45 | NA | NA | NA |
| 88 | 0.000004 | −6.3 | 45 | NA | NA | NA |
| 89 | 0.000004 | −6.3 | 45 | NA | NA | NA |
| 90 | 0.000004 | −6.3 | 45 | NA | NA | NA |
| 91 | 0.000004 | −6.3 | 45 | NA | NA | NA |
| 4 | 0.000003 | −6.4 | 45 | NA | NA | NA |
| 92 | 0.000003 | −6.4 | 45 | NA | NA | NA |
| 93 | 0.000003 | −6.4 | 45 | NA | NA | NA |
| 94 | 0.000003 | −6.4 | 45 | NA | NA | NA |
| 95 | 0.000003 | −6.4 | 45 | NA | NA | NA |
| 96 | 0.000003 | −6.4 | 45 | NA | NA | NA |
| 97 | 0.000003 | −6.4 | 45 | NA | NA | NA |
| 5 | 0.000002 | −6.5 | 44 | 0.000002 | −6.8 | 39 |
| 98 | 0.000002 | −6.5 | 44 | 0.000002 | −6.8 | 39 |
| 6 | 0.000001 | −6.6 | 44 | NA | NA | NA |
| 7 | 0.000018 | −5.9 | 53 | NA | NA | NA |
| 99 | 0.000018 | −5.9 | 53 | NA | NA | NA |
| 8 | 0.000007 | −6.2 | 53 | NA | NA | NA |
| 100 | 0.000007 | −6.2 | 53 | NA | NA | NA |
| 9 | 0.000005 | −6.3 | 53 | NA | NA | NA |
| 10 | 0.00001 | −6.4 | 65 | NA | NA | NA |
| 11 | 0.000012 | −6.3 | 66 | NA | NA | NA |
| 12 | 0.000014 | −6 | 52 | 0.000026 | −6 | 50 |
| 13 | 0.000008 | −6.1 | 54 | NA | NA | NA |
| 101 | 0.000008 | −6.1 | 54 | NA | NA | NA |
| 14 | 0.000028 | −5.8 | 54 | 0.000016 | −6.1 | 50 |
| 102 | 0.000028 | −5.8 | 54 | 0.000016 | −6.1 | 50 |
| 15 | 0.00002 | −5.9 | 54 | NA | NA | NA |
| 16 | 0.000022 | −5.8 | 52 | 0.000053 | −5.7 | 50 |
| 17 | 0.001307 | −4.5 | 46 | 0.001085 | −4.7 | 45 |
| 18 | 0.000003 | −7 | 45 | 0.000004 | −6.6 | 40 |
| 19 | 0.000033 | −5.8 | 43 | 0.000007 | −6.5 | 40 |
| 20 | 0.000017 | −6.3 | 54 | 0.00001 | −6.2 | 50 |
| 103 | 0.000017 | −6.3 | 54 | 0.00001 | −6.2 | 50 |
| 104 | 0.000017 | −6.3 | 54 | 0.00001 | −6.2 | 50 |
| 105 | 0.000017 | −6.3 | 54 | 0.00001 | −6.2 | 50 |
| 21 | 0.000107 | −5.4 | 52 | 0.000049 | −5.8 | 51 |
| 22 | 0.000084 | −5.4 | 50 | 0.000069 | −5.7 | 48 |
| 23 | 0.00022 | −5.1 | 48 | 0.000027 | −6 | 48 |
| 24 | 0.000113 | −5.3 | 50 | 0.000035 | −5.9 | 50 |
| 25 | 0.000031 | −6.1 | 54 | 0.000016 | −6.1 | 50 |
| 26 | 0.000013 | −6.4 | 54 | 0.000018 | −6.1 | 50 |
| 106 | 0.000013 | −6.4 | 54 | 0.000018 | −6.1 | 50 |
| 27 | 0.000006 | −6.6 | 55 | 0.000007 | −6.3 | 51 |
| 107 | 0.000006 | −6.6 | 55 | 0.000007 | −6.3 | 51 |
| 28 | 0.000092 | −5.4 | 54 | 0.000037 | −5.9 | 51 |
| 108 | 0.000092 | −5.4 | 54 | 0.000037 | −5.9 | 51 |
| 29 | 0.000029 | −6.1 | 55 | 0.000017 | −6.1 | 52 |

TABLE 15
Markers in PER3 Associated with Better Vilazodone Response
Measured as Change of MADRS

| | | Re- | | | | |
|---|---|---|---|---|---|---|
| | | sponse | Percent | | | Percent |
| | | differ- | with | | Response | with |
| | | ence | marker | | difference | marker |
| | p (all | (all | (all | p (Cauc. | (Cauc. | (Cauc. |
| Marker | ethnic.) | ethnic.) | ethnic.) | only) | only) | only) |
| 1 | 0.000034 | −6.3 | 29 | 0.000018 | −6.6 | 30 |
| 23 | 0.000034 | −6.3 | 29 | 0.000018 | −6.6 | 30 |
| 24 | 0.000034 | −6.3 | 29 | 0.000018 | −6.6 | 30 |
| 25 | 0.000034 | −6.3 | 29 | 0.000018 | −6.6 | 30 |
| 26 | 0.000034 | −6.3 | 29 | 0.000018 | −6.6 | 30 |
| 27 | 0.000034 | −6.3 | 29 | 0.000018 | −6.6 | 30 |
| 28 | 0.000034 | −6.3 | 29 | 0.000018 | −6.6 | 30 |
| 29 | 0.000034 | −6.3 | 29 | 0.000018 | −6.6 | 30 |
| 30 | 0.000034 | −6.3 | 29 | 0.000018 | −6.6 | 30 |
| 2 | 0.000195 | −5.8 | 27 | 0.000169 | −6 | 28 |
| 31 | 0.000195 | −5.8 | 27 | 0.000169 | −6 | 28 |
| 32 | 0.000195 | −5.8 | 27 | 0.000169 | −6 | 28 |
| 3 | 0.001412 | −7 | 11 | 0.002178 | −6.7 | 12 |
| 33 | 0.001412 | −7 | 11 | 0.002178 | −6.7 | 12 |
| 34 | 0.001412 | −7 | 11 | 0.002178 | −6.7 | 12 |
| 35 | 0.001412 | −7 | 11 | 0.002178 | −6.7 | 12 |
| 36 | 0.001412 | −7 | 11 | 0.002178 | −6.7 | 12 |
| 37 | 0.001412 | −7 | 11 | 0.002178 | −6.7 | 12 |
| 38 | 0.001412 | −7 | 11 | 0.002178 | −6.7 | 12 |
| 39 | 0.001412 | −7 | 11 | 0.002178 | −6.7 | 12 |
| 40 | 0.001412 | −7 | 11 | 0.002178 | −6.7 | 12 |
| 41 | 0.001412 | −7 | 11 | 0.002178 | −6.7 | 12 |
| 42 | 0.001412 | −7 | 11 | 0.002178 | −6.7 | 12 |
| 43 | 0.001412 | −7 | 11 | 0.002178 | −6.7 | 12 |
| 44 | 0.001412 | −7 | 11 | 0.002178 | −6.7 | 12 |
| 45 | 0.001412 | −7 | 11 | 0.002178 | −6.7 | 12 |
| 46 | 0.001412 | −7 | 11 | 0.002178 | −6.7 | 12 |
| 47 | 0.001412 | −7 | 11 | 0.002178 | −6.7 | 12 |
| 48 | 0.001412 | −7 | 11 | 0.002178 | −6.7 | 12 |
| 49 | 0.001412 | −7 | 11 | 0.002178 | −6.7 | 12 |
| 50 | 0.001412 | −7 | 11 | 0.002178 | −6.7 | 12 |
| 51 | 0.001412 | −7 | 11 | 0.002178 | −6.7 | 12 |
| 52 | 0.001412 | −7 | 11 | 0.002178 | −6.7 | 12 |
| 53 | 0.001412 | −7 | 11 | 0.002178 | −6.7 | 12 |
| 54 | 0.001412 | −7 | 11 | 0.002178 | −6.7 | 12 |
| 55 | 0.001412 | −7 | 11 | 0.002178 | −6.7 | 12 |
| 56 | 0.001412 | −7 | 11 | 0.002178 | −6.7 | 12 |
| 57 | 0.001412 | −7 | 11 | 0.002178 | −6.7 | 12 |
| 58 | 0.001412 | −7 | 11 | 0.002178 | −6.7 | 12 |
| 59 | 0.001412 | −7 | 11 | 0.002178 | −6.7 | 12 |
| 60 | 0.001412 | −7 | 11 | 0.002178 | −6.7 | 12 |
| 61 | 0.001412 | −7 | 11 | 0.002178 | −6.7 | 12 |
| 62 | 0.001412 | −7 | 11 | 0.002178 | −6.7 | 12 |
| 63 | 0.001412 | −7 | 11 | 0.002178 | −6.7 | 12 |
| 64 | 0.001412 | −7 | 11 | 0.002178 | −6.7 | 12 |
| 65 | 0.001412 | −7 | 11 | 0.002178 | −6.7 | 12 |
| 66 | 0.001412 | −7 | 11 | 0.002178 | −6.7 | 12 |
| 67 | 0.001412 | −7 | 11 | 0.002178 | −6.7 | 12 |
| 68 | 0.001412 | −7 | 11 | 0.002178 | −6.7 | 12 |
| 4 | 0.000063 | −6.1 | 28 | 0.00004 | −6.4 | 29 |
| 69 | 0.000063 | −6.1 | 28 | 0.00004 | −6.4 | 29 |
| 70 | 0.000063 | −6.1 | 28 | 0.00004 | −6.4 | 29 |
| 5 | 0.000207 | −5.9 | 25 | 0.000187 | −5.9 | 28 |
| 71 | 0.000207 | −5.9 | 25 | 0.000187 | −5.9 | 28 |
| 6 | 0.000227 | −5.6 | 29 | 0.000205 | −5.8 | 30 |
| 72 | 0.000227 | −5.6 | 29 | 0.000205 | −5.8 | 30 |
| 73 | 0.000227 | −5.6 | 29 | 0.000205 | −5.8 | 30 |
| 7 | 0.000346 | −5.6 | 27 | 0.000091 | −6.2 | 29 |
| 74 | 0.000346 | −5.6 | 27 | 0.000091 | −6.2 | 29 |
| 75 | 0.000346 | −5.6 | 27 | 0.000091 | −6.2 | 29 |
| 8 | 0.001412 | −7 | 11 | 0.002178 | −6.7 | 12 |
| 76 | 0.001412 | −7 | 11 | 0.002178 | −6.7 | 12 |
| 77 | 0.001412 | −7 | 11 | 0.002178 | −6.7 | 12 |
| 78 | 0.001412 | −7 | 11 | 0.002178 | −6.7 | 12 |
| 79 | 0.001412 | −7 | 11 | 0.002178 | −6.7 | 12 |
| 9 | 0.000181 | −5.8 | 28 | 0.000034 | −6.4 | 30 |
| 80 | 0.000181 | −5.8 | 28 | 0.000034 | −6.4 | 30 |
| 81 | 0.000181 | −5.8 | 28 | 0.000034 | −6.4 | 30 |
| 10 | 0.000245 | −5.5 | 31 | 0.000349 | −5.5 | 31 |
| 82 | 0.000245 | −5.5 | 31 | 0.000349 | −5.5 | 31 |
| 11 | 0.000207 | −5.9 | 25 | NA | NA | NA |
| 12 | 0.000402 | −5.8 | 24 | 0.000374 | −5.8 | 26 |
| 83 | 0.000402 | −5.8 | 24 | 0.000374 | −5.8 | 26 |
| 84 | 0.000402 | −5.8 | 24 | 0.000374 | −5.8 | 26 |
| 13 | 0.000402 | −5.8 | 24 | 0.000374 | −5.8 | 26 |
| 14 | 0.000621 | −5.1 | 32 | 0.000756 | −5.2 | 33 |
| 85 | 0.000621 | −5.1 | 32 | 0.000756 | −5.2 | 33 |
| 86 | 0.000621 | −5.1 | 32 | 0.000756 | −5.2 | 33 |
| 87 | 0.000621 | −5.1 | 32 | 0.000756 | −5.2 | 33 |
| 88 | 0.000621 | −5.1 | 32 | 0.000756 | −5.2 | 33 |
| 89 | 0.000621 | −5.1 | 32 | 0.000756 | −5.2 | 33 |
| 15 | 0.247055 | −1.8 | 73 | 0.000187 | −5.9 | 28 |
| 16 | 0.000477 | −5.5 | 26 | 0.000187 | −5.9 | 28 |
| 90 | 0.000477 | −5.5 | 26 | 0.000187 | −5.9 | 28 |
| 91 | 0.000477 | −5.5 | 26 | 0.000187 | −5.9 | 28 |
| 17 | 0.000477 | −5.5 | 26 | 0.000187 | −5.9 | 28 |
| 18 | 0.000346 | −5.6 | 27 | 0.000091 | −6.2 | 29 |
| 19 | 0.000436 | −5.5 | 27 | 0.000155 | −6 | 29 |
| 92 | 0.000436 | −5.5 | 27 | 0.000155 | −6 | 29 |
| 93 | 0.000436 | −5.5 | 27 | 0.000155 | −6 | 29 |
| 20 | 0.000886 | −5.3 | 26 | 0.000299 | −5.8 | 28 |
| 21 | 0.00034 | −5.7 | 26 | 0.000343 | −5.8 | 27 |
| 22 | 0.0016 | −5.1 | 25 | 0.000704 | −5.5 | 26 |

TABLE 16
Markers in PLCB1 Associated with Better Vilazodone Response
Measured as Change of MADRS

| | | Re- | | | | |
|---|---|---|---|---|---|---|
| | | sponse | Percent | | | Percent |
| | | differ- | with | | Response | with |
| | | ence | marker | | difference | marker |
| | p (all | (all | (all | p (Cauc. | (Cauc. | (Cauc. |
| Marker | ethnic.) | ethnic.) | ethnic.) | only) | only) | only) |
| 1 | 0.001904 | −4.8 | 28 | 0.000135 | −6.1 | 27 |
| 23 | 0.001904 | −4.8 | 28 | 0.000135 | −6.1 | 27 |
| 2 | 0.001928 | −4.8 | 27 | 0.000132 | −6.2 | 26 |
| 24 | 0.001928 | −4.8 | 27 | 0.000132 | −6.2 | 26 |
| 3 | 0.002002 | −5.1 | 24 | 0.000162 | −6.5 | 22 |
| 25 | 0.002002 | −5.1 | 24 | 0.000162 | −6.5 | 22 |
| 26 | 0.002002 | −5.1 | 24 | 0.000162 | −6.5 | 22 |
| 27 | 0.002002 | −5.1 | 24 | 0.000162 | −6.5 | 22 |
| 28 | 0.002002 | −5.1 | 24 | 0.000162 | −6.5 | 22 |
| 29 | 0.002002 | −5.1 | 24 | 0.000162 | −6.5 | 22 |
| 30 | 0.002002 | −5.1 | 24 | 0.000162 | −6.5 | 22 |
| 31 | 0.002002 | −5.1 | 24 | 0.000162 | −6.5 | 22 |
| 32 | 0.002002 | −5.1 | 24 | 0.000162 | −6.5 | 22 |
| 33 | 0.002002 | −5.1 | 24 | 0.000162 | −6.5 | 22 |
| 34 | 0.002002 | −5.1 | 24 | 0.000162 | −6.5 | 22 |
| 35 | 0.002002 | −5.1 | 24 | 0.000162 | −6.5 | 22 |
| 36 | 0.002002 | −5.1 | 24 | 0.000162 | −6.5 | 22 |
| 37 | 0.002002 | −5.1 | 24 | 0.000162 | −6.5 | 22 |
| 38 | 0.002002 | −5.1 | 24 | 0.000162 | −6.5 | 22 |
| 39 | 0.002002 | −5.1 | 24 | 0.000162 | −6.5 | 22 |
| 4 | 0.001985 | −5.1 | 23 | 0.000151 | −6.6 | 21 |
| 40 | 0.001985 | −5.1 | 23 | 0.000151 | −6.6 | 21 |
| 41 | 0.001985 | −5.1 | 23 | 0.000151 | −6.6 | 21 |
| 42 | 0.001985 | −5.1 | 23 | 0.000151 | −6.6 | 21 |
| 43 | 0.001985 | −5.1 | 23 | 0.000151 | −6.6 | 21 |
| 44 | 0.001985 | −5.1 | 23 | 0.000151 | −6.6 | 21 |
| 45 | 0.001985 | −5.1 | 23 | 0.000151 | −6.6 | 21 |
| 46 | 0.001985 | −5.1 | 23 | 0.000151 | −6.6 | 21 |
| 47 | 0.001985 | −5.1 | 23 | 0.000151 | −6.6 | 21 |
| 48 | 0.001985 | −5.1 | 23 | 0.000151 | −6.6 | 21 |
| 49 | 0.001985 | −5.1 | 23 | 0.000151 | −6.6 | 21 |
| 50 | 0.001985 | −5.1 | 23 | 0.000151 | −6.6 | 21 |
| 51 | 0.001985 | −5.1 | 23 | 0.000151 | −6.6 | 21 |
| 52 | 0.001985 | −5.1 | 23 | 0.000151 | −6.6 | 21 |
| 53 | 0.001985 | −5.1 | 23 | 0.000151 | −6.6 | 21 |
| 54 | 0.001985 | −5.1 | 23 | 0.000151 | −6.6 | 21 |
| 5 | 0.004619 | −4.3 | 31 | 0.000152 | −5.9 | 29 |
| 55 | 0.004619 | −4.3 | 31 | 0.000152 | −5.9 | 29 |
| 6 | 0.004747 | −4.3 | 31 | 0.000152 | −6 | 29 |
| 56 | 0.004747 | −4.3 | 31 | 0.000152 | −6 | 29 |
| 57 | 0.004747 | −4.3 | 31 | 0.000152 | −6 | 29 |
| 7 | 0.008926 | −3.9 | 33 | 0.000491 | −5.4 | 31 |
| 58 | 0.008926 | −3.9 | 33 | 0.000491 | −5.4 | 31 |
| 8 | 0.004747 | −4.3 | 31 | 0.000152 | −6 | 29 |
| 9 | 0.000908 | −5.1 | 28 | 0.00007 | −6.4 | 27 |
| 59 | 0.000908 | −5.1 | 28 | 0.00007 | −6.4 | 27 |
| 10 | 0.002695 | −4.6 | 29 | 0.000259 | −5.8 | 29 |
| 60 | 0.002695 | −4.6 | 29 | 0.000259 | −5.8 | 29 |
| 11 | 0.000915 | −5.2 | 27 | 0.000068 | −6.4 | 26 |
| 61 | 0.000915 | −5.2 | 27 | 0.000068 | −6.4 | 26 |
| 12 | 0.000662 | −5.6 | 24 | 0.000048 | −7 | 22 |
| 62 | 0.000662 | −5.6 | 24 | 0.000048 | −7 | 22 |
| 63 | 0.000662 | −5.6 | 24 | 0.000048 | −7 | 22 |
| 64 | 0.000662 | −5.6 | 24 | 0.000048 | −7 | 22 |
| 65 | 0.000662 | −5.6 | 24 | 0.000048 | −7 | 22 |
| 66 | 0.000662 | −5.6 | 24 | 0.000048 | −7 | 22 |
| 67 | 0.000662 | −5.6 | 24 | 0.000048 | −7 | 22 |
| 68 | 0.000662 | −5.6 | 24 | 0.000048 | −7 | 22 |
| 13 | 0.002246 | −4.9 | 25 | 0.000224 | −6.2 | 23 |
| 69 | 0.002246 | −4.9 | 25 | 0.000224 | −6.2 | 23 |
| 70 | 0.002246 | −4.9 | 25 | 0.000224 | −6.2 | 23 |
| 71 | 0.002246 | −4.9 | 25 | 0.000224 | −6.2 | 23 |
| 72 | 0.002246 | −4.9 | 25 | 0.000224 | −6.2 | 23 |
| 73 | 0.002246 | −4.9 | 25 | 0.000224 | −6.2 | 23 |
| 74 | 0.002246 | −4.9 | 25 | 0.000224 | −6.2 | 23 |
| 75 | 0.002246 | −4.9 | 25 | 0.000224 | −6.2 | 23 |
| 14 | 0.000648 | −5.6 | 23 | 0.000044 | −7.1 | 21 |
| 76 | 0.000648 | −5.6 | 23 | 0.000044 | −7.1 | 21 |
| 77 | 0.000648 | −5.6 | 23 | 0.000044 | −7.1 | 21 |
| 78 | 0.000648 | −5.6 | 23 | 0.000044 | −7.1 | 21 |
| 79 | 0.000648 | −5.6 | 23 | 0.000044 | −7.1 | 21 |
| 80 | 0.000648 | −5.6 | 23 | 0.000044 | −7.1 | 21 |
| 81 | 0.000648 | −5.6 | 23 | 0.000044 | −7.1 | 21 |
| 82 | 0.000648 | −5.6 | 23 | 0.000044 | −7.1 | 21 |
| 15 | 0.015084 | −4 | 24 | 0.000253 | −6.5 | 20 |
| 83 | 0.015084 | −4 | 24 | 0.000253 | −6.5 | 20 |
| 84 | 0.015084 | −4 | 24 | 0.000253 | −6.5 | 20 |
| 85 | 0.015084 | −4 | 24 | 0.000253 | −6.5 | 20 |
| 16 | 0.017091 | −4.2 | 20 | 0.000227 | −7.3 | 16 |
| 86 | 0.017091 | −4.2 | 20 | 0.000227 | −7.3 | 16 |
| 87 | 0.017091 | −4.2 | 20 | 0.000227 | −7.3 | 16 |
| 88 | 0.017091 | −4.2 | 20 | 0.000227 | −7.3 | 16 |
| 89 | 0.017091 | −4.2 | 20 | 0.000227 | −7.3 | 16 |
| 90 | 0.017091 | −4.2 | 20 | 0.000227 | −7.3 | 16 |
| 91 | 0.017091 | −4.2 | 20 | 0.000227 | −7.3 | 16 |
| 92 | 0.017091 | −4.2 | 20 | 0.000227 | −7.3 | 16 |
| 93 | 0.017091 | −4.2 | 20 | 0.000227 | −7.3 | 16 |
| 94 | 0.017091 | −4.2 | 20 | 0.000227 | −7.3 | 16 |
| 95 | 0.017091 | −4.2 | 20 | 0.000227 | −7.3 | 16 |
| 96 | 0.017091 | −4.2 | 20 | 0.000227 | −7.3 | 16 |
| 97 | 0.017091 | −4.2 | 20 | 0.000227 | −7.3 | 16 |
| 98 | 0.017091 | −4.2 | 20 | 0.000227 | −7.3 | 16 |
| 99 | 0.017091 | −4.2 | 20 | 0.000227 | −7.3 | 16 |
| 100 | 0.017091 | −4.2 | 20 | 0.000227 | −7.3 | 16 |
| 17 | 0.002639 | −4.7 | 27 | 0.00023 | −6 | 26 |
| 101 | 0.002639 | −4.7 | 27 | 0.00023 | −6 | 26 |
| 18 | 0.002669 | −4.7 | 27 | 0.000226 | −6 | 26 |
| 102 | 0.002669 | −4.7 | 27 | 0.000226 | −6 | 26 |
| 19 | 0.003485 | −4.6 | 26 | 0.000093 | −6.6 | 23 |
| 103 | 0.003485 | −4.6 | 26 | 0.000093 | −6.6 | 23 |
| 104 | 0.003485 | −4.6 | 26 | 0.000093 | −6.6 | 23 |
| 105 | 0.003485 | −4.6 | 26 | 0.000093 | −6.6 | 23 |
| 106 | 0.003485 | −4.6 | 26 | 0.000093 | −6.6 | 23 |
| 107 | 0.003485 | −4.6 | 26 | 0.000093 | −6.6 | 23 |
| 108 | 0.003485 | −4.6 | 26 | 0.000093 | −6.6 | 23 |
| 109 | 0.003485 | −4.6 | 26 | 0.000093 | −6.6 | 23 |
| 20 | 0.003514 | −4.7 | 25 | 0.000088 | −6.7 | 22 |
| 110 | 0.003514 | −4.7 | 25 | 0.000088 | −6.7 | 22 |
| 111 | 0.003514 | −4.7 | 25 | 0.000088 | −6.7 | 22 |
| 112 | 0.003514 | −4.7 | 25 | 0.000088 | −6.7 | 22 |
| 113 | 0.003514 | −4.7 | 25 | 0.000088 | −6.7 | 22 |
| 114 | 0.003514 | −4.7 | 25 | 0.000088 | −6.7 | 22 |
| 115 | 0.003514 | −4.7 | 25 | 0.000088 | −6.7 | 22 |
| 116 | 0.003514 | −4.7 | 25 | 0.000088 | −6.7 | 22 |
| 117 | 0.003514 | −4.7 | 25 | 0.000088 | −6.7 | 22 |
| 118 | 0.003514 | −4.7 | 25 | 0.000088 | −6.7 | 22 |
| 119 | 0.003514 | −4.7 | 25 | 0.000088 | −6.7 | 22 |
| 120 | 0.003514 | −4.7 | 25 | 0.000088 | −6.7 | 22 |
| 121 | 0.003514 | −4.7 | 25 | 0.000088 | −6.7 | 22 |
| 122 | 0.003514 | −4.7 | 25 | 0.000088 | −6.7 | 22 |
| 123 | 0.003514 | −4.7 | 25 | 0.000088 | −6.7 | 22 |
| 21 | 0.007488 | −4.2 | 28 | 0.000379 | −5.9 | 25 |
| 124 | 0.007488 | −4.2 | 28 | 0.000379 | −5.9 | 25 |
| 125 | 0.007488 | −4.2 | 28 | 0.000379 | −5.9 | 25 |
| 126 | 0.007488 | −4.2 | 28 | 0.000379 | −5.9 | 25 |
| 127 | 0.007488 | −4.2 | 28 | 0.000379 | −5.9 | 25 |
| 128 | 0.007488 | −4.2 | 28 | 0.000379 | −5.9 | 25 |
| 129 | 0.007488 | −4.2 | 28 | 0.000379 | −5.9 | 25 |
| 130 | 0.007488 | −4.2 | 28 | 0.000379 | −5.9 | 25 |
| 22 | 0.003514 | −4.7 | 25 | 0.000088 | −6.7 | 22 |

TABLE 17
Markers in PSMD1 Associated with Better Vilazodone Response
Measured as Change of MADRS

| | | Re- | | | | |
|---|---|---|---|---|---|---|
| | | sponse | Percent | | | Percent |
| | | differ- | with | | Response | with |
| | | ence | marker | | difference | marker |
| | p (all | (all | (all | p (Cauc. | (Cauc. | (Cauc. |
| Marker | ethnic.) | ethnic.) | ethnic.) | only) | only) | only) |
| 1 | 0.006514 | −7.2 | 8 | 0.109125 | −4.6 | 7 |
| 2 | 0.000086 | −10.6 | 93 | 0.409365 | −1.6 | 18 |
| 13 | 0.000086 | −10.6 | 93 | 0.409365 | −1.6 | 18 |
| 14 | 0.000086 | −10.6 | 93 | 0.409365 | −1.6 | 18 |
| 3 | 0.000629 | −10.2 | 94 | 0.333402 | −1.9 | 16 |
| 15 | 0.000629 | −10.2 | 94 | 0.333402 | −1.9 | 16 |
| 4 | 0.000086 | −10.6 | 93 | 0.171556 | −2.6 | 19 |
| 5 | 0.000418 | −7.9 | 89 | 0.145392 | −4.2 | 93 |
| 6 | 0.000323 | −7.8 | 89 | 0.145392 | −4.2 | 93 |
| 7 | 0.000323 | −7.8 | 89 | 0.339199 | −1.4 | 44 |
| 8 | 0.000713 | −6.3 | 83 | 0.170909 | −3.1 | 88 |
| 9 | 0.000666 | −5.2 | 71 | 0.127275 | −2.6 | 75 |
| 10 | 0.000553 | −9.8 | 94 | NA | NA | NA |
| 16 | 0.000553 | −9.8 | 94 | NA | NA | NA |
| 17 | 0.000553 | −9.8 | 94 | NA | NA | NA |
| 18 | 0.000553 | −9.8 | 94 | NA | NA | NA |
| 19 | 0.000553 | −9.8 | 94 | NA | NA | NA |
| 20 | 0.000553 | −9.8 | 94 | NA | NA | NA |
| 11 | 0.000381 | −7 | 85 | 0.188158 | −3.2 | 90 |
| 12 | 0.000561 | −5.5 | 75 | 0.165732 | −2.5 | 78 |

### Example 6

[0149] This example illustrates analysis of the markers in Tables A-18 to A-20 (Appendix A) for association with vilazodone response. The clinical outcomes were improvement in disease over eight weeks of treatment with vilazodone as measured by the MADRS scale. A linear model was first fitted on the covariates, which were treatment center, race, ethnicity, and baseline values. The resulting residuals were used as the outcome in a linear regression analysis in which, for each polymorphism being considered, the genotype of each patient treated with vilazodone was turned into zero, one, or two as the copy number of a reference allele. For top polymorphisms from the analysis, the dominant or recessive mode was further used to define the marker and divide the sample into two groups. The unadjusted (“raw”) p-values, the differences between the mean MADRS score decreases among the patients who carry the markers compared with those who do not, and the percentages of the patients who carry the markers are shown in Tables 18-20 below.

TABLE 18
Markers in ABI1 Associated with Better Vilazodone Response
Measured as Change of MADRS

| | | Re- | | | | |
|---|---|---|---|---|---|---|
| | | sponse | Percent | | | Percent |
| | | Differ- | with | | Response | with |
| | | ence | Marker | | Difference | Marker |
| | p (all | (all | (all | p (Cauc. | (Cauc. | (Cauc. |
| Marker | ethnic.) | ethnic.) | ethnic.) | only) | only) | only) |
| 1 | 0.000002 | −7.5 | 59 | 0.000242 | −6.1 | 64 |
| 2 | 0.000008 | −7.0 | 61 | 0.000312 | −6.0 | 65 |
| 3 | 0.000018 | −6.9 | 63 | 0.001956 | −5.2 | 66 |

TABLE 19
Markers in LOC402382 Associated with Better Vilazodone
Response Measured as Change of MADRS

| | | Re- | | | | |
|---|---|---|---|---|---|---|
| | | sponse | Percent | | | Percent |
| | | differ- | with | | Response | with |
| | | ence | marker | | difference | marker |
| | p (all | (all | (all | p (Cauc. | (Cauc. | (Cauc. |
| Marker | ethnic.) | ethnic.) | ethnic.) | only) | only) | only) |
| 1 | 0.000984 | −5.1 | 57 | 0.000032 | −6.5 | 58 |

TABLE 20
Markers in NCALD Associated with Better Vilazodone Response
Measured as Change of MADRS

| | | Re- | | | | |
|---|---|---|---|---|---|---|
| | | sponse | Percent | | | Percent |
| | | differ- | with | | Response | with |
| | | ence | marker | | difference | marker |
| | p (all | (all | (all | p (Cauc. | (Cauc. | (Cauc. |
| Marker | ethnic.) | ethnic.) | ethnic.) | only) | only) | only) |
| 1 | 0.000022 | −6.5 | 37 | 0.000188 | −5.9 | 38 |

[0150] In view of the above, it will be seen that the several advantages of the invention are achieved and other advantageous results attained. As various changes could be made in the above methods and compositions without departing from the scope of the invention, it is intended that all matter contained in the above description and shown in the accompanying drawings shall be interpreted as illustrative and not in a limiting sense.

[0151] All references cited in this specification, including patents and patent applications are hereby incorporated in their entirety by reference. The discussion of references herein is intended merely to summarize the assertions made by their authors and no admission is made that any reference constitutes prior art. Applicants reserve the right to challenge the accuracy and pertinence of the cited references.

### APPENDIX A

TABLE A-1
Markers in ACE Gene Associated with
Better Antidepressant Response

| | | Copy |
|---|---|---|
| Marker | Polymorphisms | Number |
| 1 | PS29-C, PS32-C, PS36-C | 0 |
| 2 | PS32-C, PS36-C | 0 |
| 3 | PS5-G, PS8-C, PS35-T | 1 OR 2 |
| 4 | PS6-C | 1 OR 2 |
| 5 | PS6-C, PS25-C, PS35-T | 1 OR 2 |
| 6 | PS6-C, PS26-C, PS35-T | 1 OR 2 |
| 7 | PS6-C, PS35-T | 1 OR 2 |
| 8 | PS6-C, PS10-C, PS35-T | 1 OR 2 |
| 9 | PS8-C, PS16-C, PS33-T | 1 OR 2 |
| 10 | PS8-C, PS16-C, PS35-T | 1 OR 2 |
| 11 | PS3-T | 1 OR 2 |
| 12 | PS3-T, PS33-T | 1 OR 2 |
| 13 | PS3-T, PS35-T | 1 OR 2 |
| 14 | PS28-C, PS32-C, PS36-C | 0 |
| 15 | PS32-C | 0 |
| 16 | PS37-C | 1 OR 2 |
| 17 | PS5-A, PS36-C, PS37-T | 0 |
| 18 | PS6-G, PS37-T | 0 OR 1 |
| 19 | PS8-C, PS32-C, PS36-C | 0 |
| 20 | PS8-C, PS32-T | 2 |
| 21 | PS8-C, PS10-C, PS32-T | 2 |
| 22 | PS8-C, PS14-G, PS32-T | 2 |
| 23 | PS2-G, PS4-T, PS37-T | 0 OR 1 |
| 24 | PS16-T, PS36-C, PS37-T | 0 |
| 25 | PS4-C | 1 OR 2 |
| 26 | PS4-T, PS37-T | 0 OR 1 |
| 27 | PS5-G, PS8-C, PS24-G | 1 OR 2 |
| 28 | PS1-G, PS5-G, PS8-C | 1 OR 2 |
| 29 | PS6-C, PS27-C, PS35-T | 1 OR 2 |
| 30 | PS6-C, PS30-G, PS35-T | 1 OR 2 |
| 31 | PS8-C, PS16-C, PS34-C | 1 OR 2 |
| 32 | PS6-C, PS7-C, PS9-C | 1 OR 2 |
| 33 | PS6-C, PS7-C, PS12-G | 1 OR 2 |
| 34 | PS3-T, PS34-C | 1 OR 2 |
| 35 | PS3-T, PS11-C, PS33-T | 1 OR 2 |
| 36 | PS3-T, PS11-C, PS34-C | 1 OR 2 |
| 37 | PS4-T, PS31-C, PS37-T | 2 |
| 38 | PS4-T, PS7-C, PS37-T | 2 |
| 39 | PS4-T, PS13-C, PS37-T | 2 |
| 40 | PS4-T, PS15-C, PS37-T | 2 |
| 41 | PS4-T, PS17-G, PS37-T | 2 |
| 42 | PS18-G, PS36-C, PS37-T | 1 OR 2 |
| 43 | PS19-C, PS36-C, PS37-T | 1 OR 2 |
| 44 | PS20-C, PS36-C, PS37-T | 1 OR 2 |
| 45 | PS21-I, PS36-C, PS37-T | 1 OR 2 |
| 46 | PS22-C, PS36-C, PS37-T | 1 OR 2 |
| 47 | PS23-C, PS36-C, PS37-T | 1 OR 2 |

TABLE A-2
Markers in ATP5G3 Gene Associated
with Better Antidepressant Response

| | | Copy |
|---|---|---|
| Marker | Polymorphisms | Number |
| 1 | PS1-T, PS2-C | 0 OR 1 |
| 2 | PS1-C | 1 OR 2 |

TABLE A-3
Markers in BCL2L1 Gene Associated with
Better Antidepressant Response

| | | Copy |
|---|---|---|
| Marker | Polymorphisms | Number |
| 1 | PS1-A | 1 OR 2 |
| 2 | PS1-G | 0 |
| 3 | PS2-C | 2 |
| 4 | PS3-G | 0 |
| 5 | PS2-C, PS4-T | 1 OR 2 |
| 6 | PS4-T, PS8-T | 1 OR 2 |
| 7 | PS4-T, PS5-G | 1 OR 2 |
| 8 | PS4-T, PS7-G | 1 OR 2 |
| 9 | PS6-C | 1 OR 2 |
| 10 | PS6-G | 1 OR 2 |
| 11 | PS8-T | 2 |
| 12 | PS3-A | 2 |
| 13 | PS5-G | 2 |
| 14 | PS7-G | 2 |
| 15 | PS1-G, PS4-T | 1 OR 2 |
| 16 | PS8-C | 1 OR 2 |
| 17 | PS2-T | 1 OR 2 |
| 18 | PS4-T, PS6-G | 1 OR 2 |
| 19 | PS5-C | 1 OR 2 |
| 20 | PS7-T | 1 OR 2 |

TABLE A-4
Markers in CYP2C9 Gene Associated with
Better Antidepressant Response

| | | Copy |
|---|---|---|
| Marker | Polymorphisms | Number |
| 1 | PS1-T, PS2-T | 2 |

TABLE A-5
Markers in DRD3 Gene Associated with
Better Antidepressant Response

| | | Copy |
|---|---|---|
| Marker | Polymorphisms | Number |
| 1 | PS1-C, PS7-G, PS10-A | 0 |
| 2 | PS1-C, PS9-G | 0 |
| 3 | PS1-C, PS2-G, PS6-T | 0 |
| 4 | PS1-C, PS2-G, PS7-G | 0 |
| 5 | PS1-C, PS3-G, PS10-A | 0 |
| 6 | PS1-C, PS4-A, PS10-A | 0 |
| 7 | PS1-C, PS6-T, PS10-A | 1 OR 2 |
| 8 | PS1-C, PS8-T, PS10-A | 1 OR 2 |
| 9 | PS1-C, PS2-G, PS10-T | 1 OR 2 |
| 10 | PS1-C, PS5-T, PS10-A | 1 OR 2 |

TABLE A-6
Markers in FOS Gene Associated with
Better Antidepressant Response

| | | Copy |
|---|---|---|
| Marker | Polymorphisms | Number |
| 1 | PS2-T, PS4-G, PS5-T | 1 OR 2 |
| 2 | PS2-T, PS5-T | 1 OR 2 |
| 3 | PS1-C, PS2-T | 0 OR 1 |
| 4 | PS1-C, PS2-T, PS3-G | 0 OR 1 |
| 5 | PS1-C, PS2-T, PS6-T | 0 OR 1 |

TABLE A-7
Markers in DTNBP1 Gene Associated
with Better Antidepressant Response

| | | Copy |
|---|---|---|
| Marker | Polymorphisms | Number |
| 1 | PS5-T, PS14-G, PS20-G | 0 |
| 2 | PS12-A, PS14-G, PS20-G | 0 |
| 3 | PS14-G, PS16-G, PS20-G | 0 |
| 4 | PS14-G, PS17-T, PS20-G | 0 |
| 5 | PS14-G, PS18-G, PS20-G | 0 |
| 6 | PS14-G, PS19-G, PS20-G | 0 |
| 7 | PS14-G, PS20-G, PS21-A | 0 |
| 8 | PS22-G, PS23-G, PS24-C | 0 OR 1 |
| 9 | PS22-G, PS24-C | 0 OR 1 |
| 10 | PS1-T, PS14-G, PS20-G | 0 |
| 11 | PS2-C, PS6-G, PS14-G | 0 |
| 12 | PS1-T, PS14-G, PS20-G | 1 OR 2 |
| 13 | PS2-C, PS14-G, PS20-G | 1 OR 2 |
| 14 | PS3-C, PS14-G, PS20-G | 1 OR 2 |
| 15 | PS4-G, PS14-G, PS20-G | 1 OR 2 |
| 16 | PS7-G, PS14-G, PS20-G | 1 OR 2 |
| 17 | PS8-G, PS14-G, PS20-G | 1 OR 2 |
| 18 | PS10-G, PS14-G, PS20-G | 1 OR 2 |
| 19 | PS11-C, PS14-G, PS20-G | 1 OR 2 |
| 20 | PS13-A, PS14-G, PS20-G | 1 OR 2 |
| 21 | PS14-G, PS15-C, PS20-G | 1 OR 2 |
| 22 | PS2-C, PS9-C, PS14-G | 1 OR 2 |
| 23 | PS6-G, PS7-G, PS14-G | 1 OR 2 |
| 24 | PS6-G, PS8-G, PS14-G | 1 OR 2 |
| 25 | PS6-G, PS10-G, PS14-G | 1 OR 2 |
| 26 | PS6-G, PS11-C, PS14-G | 1 OR 2 |
| 27 | PS6-G, PS13-A, PS14-G | 1 OR 2 |
| 28 | PS6-G, PS14-G, PS15-C | 1 OR 2 |
| 29 | PS6-G, PS14-G, PS16-G | 1 OR 2 |
| 30 | PS7-G, PS9-C, PS14-G | 1 OR 2 |
| 31 | PS8-G, PS9-C, PS14-G | 1 OR 2 |
| 32 | PS9-C, PS10-G, PS14-G | 1 OR 2 |
| 33 | PS9-C, PS11-C, PS14-G | 1 OR 2 |
| 34 | PS9-C, PS13-A, PS14-G | 1 OR 2 |
| 35 | PS9-C, PS14-G, PS15-C | 1 OR 2 |
| 36 | PS9-C, PS14-G, PS16-G | 1 OR 2 |

TABLE A-8
Markers in GABRG3 Gene Associated
with Better Antidepressant Response

| | | Copy |
|---|---|---|
| Marker | Polymorphisms | Number |
| 1 | PS1-G, PS8-T, PS13-G | 2 |
| 2 | PS7-C, PS8-T | 2 |
| 3 | PS7-C, PS9-G | 2 |
| 4 | PS7-C, PS12-C | 2 |
| 5 | PS7-T | 0 |
| 6 | PS10-C | 0 |
| 7 | PS6-C | 0 |
| 8 | PS6-C, PS11-C | 0 |
| 9 | PS6-G, PS12-C | 2 |
| 10 | PS2-C, PS8-T, PS13-G | 2 |
| 11 | PS3-T, PS8-T, PS13-G | 2 |
| 12 | PS4-A, PS8-T, PS13-G | 2 |
| 13 | PS5-T, PS8-T, PS13-G | 2 |

TABLE A-9
Markers in GRIA4 Gene Associated with
Better Antidepressant Response

| | | Copy |
|---|---|---|
| Marker | Polymorphisms | Number |
| 1 | PS10-C, PS30-G | 0 |
| 2 | PS14-A, PS15-T, PS29-A | 1 OR 2 |
| 3 | PS6-C, PS14-A, PS15-T | 1 OR 2 |
| 4 | PS6-C, PS15-T, PS25-T | 1 OR 2 |
| 5 | PS1-A, PS17-A | 0 OR 1 |
| 6 | PS1-A, PS26-A, PS36-T | 0 |
| 7 | PS1-A, PS36-T, PS37-C | 0 |
| 8 | PS1-A, PS6-T, PS30-G | 0 |
| 9 | PS1-A, PS6-T, PS36-T | 0 |
| 10 | PS1-G | 1 OR 2 |
| 11 | PS1-G, PS6-C | 1 OR 2 |
| 12 | PS15-C | 0 |
| 13 | PS15-T, PS31-G | 2 |
| 14 | PS2-C, PS26-G | 1 OR 2 |
| 15 | PS2-C, PS29-A, PS38-T | 1 OR 2 |
| 16 | PS2-C, PS5-C, PS6-C | 1 OR 2 |
| 17 | PS2-C, PS6-C, PS11-C | 1 OR 2 |
| 18 | PS2-C, PS6-C, PS15-T | 1 OR 2 |
| 19 | PS2-C, PS6-C, PS22-C | 1 OR 2 |
| 20 | PS2-C, PS6-C, PS26-G | 1 OR 2 |
| 21 | PS2-C, PS6-C, PS27-C | 1 OR 2 |
| 22 | PS2-C, PS6-C, PS38-T | 1 OR 2 |
| 23 | PS2-C, PS7-A, PS22-C | 1 OR 2 |
| 24 | PS2-C, PS8-G, PS26-G | 1 OR 2 |
| 25 | PS2-C, PS8-G, PS27-C | 1 OR 2 |
| 26 | PS24-C, PS26-A, PS36-T | 0 |
| 27 | PS25-T, PS31-G, PS32-A | 2 |
| 28 | PS26-A, PS28-A, PS36-T | 0 |
| 29 | PS26-A, PS36-T | 0 |
| 30 | PS26-G | 1 OR 2 |
| 31 | PS27-C, PS31-G | 2 |
| 32 | PS3-C, PS17-A | 0 OR 1 |
| 33 | PS3-C, PS36-T | 0 OR 1 |
| 34 | PS3-G | 1 OR 2 |
| 35 | PS3-G, PS11-C | 1 OR 2 |
| 36 | PS3-G, PS14-A | 1 OR 2 |
| 37 | PS3-G, PS22-C | 1 OR 2 |
| 38 | PS3-G, PS22-C, PS35-C | 1 OR 2 |
| 39 | PS3-G, PS5-C | 1 OR 2 |
| 40 | PS3-G, PS5-C, PS6-C | 1 OR 2 |
| 41 | PS3-G, PS6-C | 1 OR 2 |
| 42 | PS3-G, PS6-C, PS14-A | 1 OR 2 |
| 43 | PS31-C | 0 |
| 44 | PS31-G, PS32-A | 2 |
| 45 | PS31-G, PS33-T | 2 |
| 46 | PS31-G, PS38-T | 2 |
| 47 | PS32-G | 0 |
| 48 | PS36-T, PS37-C | 0 |
| 49 | PS5-C, PS6-C, PS16-T | 1 OR 2 |
| 50 | PS5-C, PS6-C, PS22-C | 1 OR 2 |
| 51 | PS6-C, PS10-T, PS22-C | 1 OR 2 |
| 52 | PS6-C, PS16-T, PS18-G | 1 OR 2 |
| 53 | PS6-C, PS16-T, PS27-C | 1 OR 2 |
| 54 | PS6-C, PS16-T, PS32-A | 1 OR 2 |
| 55 | PS6-C, PS16-T, PS38-T | 1 OR 2 |
| 56 | PS6-C, PS22-C | 1 OR 2 |
| 57 | PS6-C, PS22-C, PS24-C | 1 OR 2 |
| 58 | PS6-C, PS22-C, PS29-A | 1 OR 2 |
| 59 | PS6-C, PS22-C, PS35-C | 1 OR 2 |
| 60 | PS6-C, PS33-T | 1 OR 2 |
| 61 | PS6-C, PS7-A, PS16-T | 1 OR 2 |
| 62 | PS6-C, PS8-G, PS26-G | 1 OR 2 |
| 63 | PS6-C, PS8-G, PS27-C | 1 OR 2 |
| 64 | PS7-A, PS10-T, PS22-C | 1 OR 2 |
| 65 | PS7-A, PS16-T | 1 OR 2 |
| 66 | PS7-A, PS22-C | 1 OR 2 |
| 67 | PS7-A, PS22-C, PS35-C | 1 OR 2 |
| 68 | PS7-T, PS26-A, PS36-T | 0 |
| 69 | PS8-G, PS26-G | 1 OR 2 |
| 70 | PS8-G, PS27-C | 1 OR 2 |
| 71 | PS10-C, PS24-C, PS36-T | 1 OR 2 |
| 72 | PS10-C, PS27-C, PS36-T | 1 OR 2 |
| 73 | PS10-C, PS28-A, PS36-T | 1 OR 2 |
| 74 | PS10-C, PS29-T, PS36-T | 1 OR 2 |
| 75 | PS10-C, PS31-C | 1 OR 2 |
| 76 | PS10-C, PS33-T, PS36-T | 1 OR 2 |
| 77 | PS10-C, PS34-G, PS36-T | 1 OR 2 |
| 78 | PS15-T, PS21-G, PS29-A | 1 OR 2 |
| 79 | PS6-C, PS15-T, PS21-G | 1 OR 2 |
| 80 | PS2-C, PS13-T, PS27-C | 1 OR 2 |
| 81 | PS2-C, PS13-T, PS30-G | 1 OR 2 |
| 82 | PS2-C, PS13-T, PS33-T | 1 OR 2 |
| 83 | PS2-C, PS13-T, PS34-G | 1 OR 2 |
| 84 | PS2-C, PS13-T, PS38-T | 1 OR 2 |
| 85 | PS2-C, PS27-C, PS29-A | 1 OR 2 |
| 86 | PS2-C, PS29-A, PS30-G | 1 OR 2 |
| 87 | PS2-C, PS29-A, PS33-T | 1 OR 2 |
| 88 | PS2-C, PS29-A, PS34-G | 1 OR 2 |
| 89 | PS2-C, PS30-C, PS31-G | 1 OR 2 |
| 90 | PS2-C, PS37-T | 1 OR 2 |
| 91 | PS2-C, PS9-A, PS27-C | 1 OR 2 |
| 92 | PS2-C, PS9-A, PS30-G | 1 OR 2 |
| 93 | PS2-C, PS9-A, PS33-T | 1 OR 2 |
| 94 | PS2-C, PS9-A, PS34-G | 1 OR 2 |
| 95 | PS2-C, PS9-A, PS38-T | 1 OR 2 |
| 96 | PS4-C, PS13-T, PS27-C | 1 OR 2 |
| 97 | PS4-C, PS13-T, PS30-G | 1 OR 2 |
| 98 | PS4-C, PS13-T, PS33-T | 1 OR 2 |
| 99 | PS4-C, PS13-T, PS34-G | 1 OR 2 |
| 100 | PS4-C, PS13-T, PS38-T | 1 OR 2 |
| 101 | PS4-C, PS26-G | 1 OR 2 |
| 102 | PS4-C, PS27-C, PS29-A | 1 OR 2 |
| 103 | PS4-C, PS29-A, PS30-G | 1 OR 2 |
| 104 | PS4-C, PS29-A, PS33-T | 1 OR 2 |
| 105 | PS4-C, PS29-A, PS34-G | 1 OR 2 |
| 106 | PS4-C, PS30-G, PS31-G | 1 OR 2 |
| 107 | PS4-C, PS37-T | 1 OR 2 |
| 108 | PS4-C, PS9-A, PS27-C | 1 OR 2 |
| 109 | PS4-C, PS9-A, PS30-G | 1 OR 2 |
| 110 | PS4-C, PS9-A, PS33-T | 1 OR 2 |
| 111 | PS4-C, PS9-A, PS34-G | 1 OR 2 |
| 112 | PS4-C, PS9-A, PS38-T | 1 OR 2 |
| 113 | PS4-C, PS29-A, PS38-T | 1 OR 2 |
| 114 | PS4-C, PS5-C, PS6-C | 1 OR 2 |
| 115 | PS2-C, PS6-C, PS12-G | 1 OR 2 |
| 116 | PS4-C, PS6-C, PS11-C | 1 OR 2 |
| 117 | PS4-C, PS6-C, PS12-G | 1 OR 2 |
| 118 | PS4-C, PS6-C, PS15-T | 1 OR 2 |
| 119 | PS2-C, PS6-C, PS23-A | 1 OR 2 |
| 120 | PS4-C, PS6-C, PS22-C | 1 OR 2 |
| 121 | PS4-C, PS6-C, PS23-A | 1 OR 2 |
| 122 | PS2-C, PS6-C, PS37-T | 1 OR 2 |
| 123 | PS4-C, PS6-C, PS26-G | 1 OR 2 |
| 124 | PS4-C, PS6-C, PS37-T | 1 OR 2 |
| 125 | PS2-C, PS6-C, PS30-G | 1 OR 2 |
| 126 | PS2-C, PS6-C, PS33-T | 1 OR 2 |
| 127 | PS2-C, PS6-C, PS34-G | 1 OR 2 |
| 128 | PS4-C, PS6-C, PS27-C | 1 OR 2 |
| 129 | PS4-C, PS6-C, PS30-G | 1 OR 2 |
| 130 | PS4-C, PS6-C, PS33-T | 1 OR 2 |
| 131 | PS4-C, PS6-C, PS34-G | 1 OR 2 |
| 132 | PS4-C, PS6-C, PS38-T | 1 OR 2 |
| 133 | PS2-C, PS7-A, PS18-G | 1 OR 2 |
| 134 | PS2-C, PS7-A, PS23-A | 1 OR 2 |
| 135 | PS2-C, PS7-A, PS27-C | 1 OR 2 |
| 136 | PS2-C, PS7-A, PS30-G | 1 OR 2 |
| 137 | PS2-C, PS7-A, PS32-A | 1 OR 2 |
| 138 | PS2-C, PS7-A, PS33-T | 1 OR 2 |
| 139 | PS2-C, PS7-A, PS34-G | 1 OR 2 |
| 140 | PS2-C, PS7-A, PS38-T | 1 OR 2 |
| 141 | PS4-C, PS7-A, PS18-G | 1 OR 2 |
| 142 | PS4-C, PS7-A, PS22-C | 1 OR 2 |
| 143 | PS4-C, PS7-A, PS23-A | 1 OR 2 |
| 144 | PS4-C, PS7-A, PS27-C | 1 OR 2 |
| 145 | PS4-C, PS7-A, PS30-G | 1 OR 2 |
| 146 | PS4-C, PS7-A, PS32-A | 1 OR 2 |
| 147 | PS4-C, PS7-A, PS33-T | 1 OR 2 |
| 148 | PS4-C, PS7-A, PS34-G | 1 OR 2 |
| 149 | PS4-C, PS7-A, PS38-T | 1 OR 2 |
| 150 | PS2-C, PS8-G, PS37-T | 1 OR 2 |
| 151 | PS4-C, PS8-G, PS26-G | 1 OR 2 |
| 152 | PS4-C, PS8-G, PS37-T | 1 OR 2 |
| 153 | PS2-C, PS8-G, PS30-G | 1 OR 2 |
| 154 | PS2-C, PS8-G, PS33-T | 1 OR 2 |
| 155 | PS2-C, PS8-G, PS34-G | 1 OR 2 |
| 156 | PS2-C, PS8-G, PS38-T | 1 OR 2 |
| 157 | PS4-C, PS8-G, PS27-C | 1 OR 2 |
| 158 | PS4-C, PS8-G, PS30-G | 1 OR 2 |
| 159 | PS4-C, PS8-G, PS33-T | 1 OR 2 |
| 160 | PS4-C, PS8-G, PS34-G | 1 OR 2 |
| 161 | PS4-C, PS8-G, PS38-T | 1 OR 2 |
| 162 | PS24-C, PS36-T, PS37-C | 1 OR 2 |
| 163 | PS28-A, PS36-T, PS37-C | 1 OR 2 |
| 164 | PS10-T, PS27-C, PS31-G | 1 OR 2 |
| 165 | PS10-T, PS31-G, PS33-T | 1 OR 2 |
| 166 | PS10-T, PS31-G, PS34-G | 1 OR 2 |
| 167 | PS24-C, PS29-A, PS38-T | 1 OR 2 |
| 168 | PS24-C, PS37-T | 1 OR 2 |
| 169 | PS27-C, PS29-A | 1 OR 2 |
| 170 | PS27-C, PS31-G, PS36-T | 1 OR 2 |
| 171 | PS27-C, PS37-T | 1 OR 2 |
| 172 | PS28-A, PS29-A, PS38-T | 1 OR 2 |
| 173 | PS28-A, PS37-T | 1 OR 2 |
| 174 | PS29-A, PS30-G | 1 OR 2 |
| 175 | PS29-A, PS33-T | 1 OR 2 |
| 176 | PS29-A, PS34-G | 1 OR 2 |
| 177 | PS30-G, PS31-G | 1 OR 2 |
| 178 | PS30-G, PS37-T | 1 OR 2 |
| 179 | PS31-G, PS33-T, PS36-T | 1 OR 2 |
| 180 | PS31-G, PS34-G, PS36-T | 1 OR 2 |
| 181 | PS33-T, PS37-T | 1 OR 2 |
| 182 | PS34-G, PS37-T | 1 OR 2 |
| 183 | PS28-A, PS31-G, PS38-T | 2 |
| 184 | PS31-G, PS34-G | 2 |
| 185 | PS3-G, PS12-G | 1 OR 2 |
| 186 | PS3-G, PS18-G | 1 OR 2 |
| 187 | PS3-G, PS23-A | 1 OR 2 |
| 188 | PS3-G, PS26-G | 1 OR 2 |
| 189 | PS3-G, PS27-C | 1 OR 2 |
| 190 | PS3-G, PS30-G | 1 OR 2 |
| 191 | PS3-G, PS32-A | 1 OR 2 |
| 192 | PS3-G, PS33-T | 1 OR 2 |
| 193 | PS3-G, PS34-G | 1 OR 2 |
| 194 | PS3-G, PS37-T | 1 OR 2 |
| 195 | PS3-G, PS38-T | 1 OR 2 |
| 196 | PS3-G, PS7-A | 1 OR 2 |
| 197 | PS3-G, PS6-C, PS7-A | 1 OR 2 |
| 198 | PS13-C, PS16-T, PS30-G | 1 OR 2 |
| 199 | PS13-C, PS19-T, PS30-G | 1 OR 2 |
| 200 | PS13-C, PS20-T, PS30-G | 1 OR 2 |
| 201 | PS13-C, PS22-C, PS30-G | 1 OR 2 |
| 202 | PS13-C, PS23-A, PS30-G | 1 OR 2 |
| 203 | PS16-T, PS26-A, PS30-G | 1 OR 2 |
| 204 | PS19-T, PS26-A, PS30-G | 1 OR 2 |
| 205 | PS20-T, PS26-A, PS30-G | 1 OR 2 |
| 206 | PS22-C, PS26-A, PS30-G | 1 OR 2 |
| 207 | PS23-A, PS26-A, PS30-G | 1 OR 2 |
| 208 | PS24-C, PS26-A, PS30-G | 1 OR 2 |
| 209 | PS26-A, PS30-G, PS33-T | 1 OR 2 |
| 210 | PS26-A, PS33-T, PS36-T | 1 OR 2 |
| 211 | PS27-C, PS36-T, PS37-C | 1 OR 2 |
| 212 | PS29-T, PS30-G | 1 OR 2 |
| 213 | PS29-T, PS36-T | 1 OR 2 |
| 214 | PS30-G, PS37-C | 1 OR 2 |
| 215 | PS33-T, PS36-T, PS37-C | 1 OR 2 |
| 216 | PS34-G, PS36-T, PS37-C | 1 OR 2 |
| 217 | PS9-G, PS16-T, PS30-G | 1 OR 2 |
| 218 | PS9-G, PS19-T, PS30-G | 1 OR 2 |
| 219 | PS9-G, PS20-T, PS30-G | 1 OR 2 |
| 220 | PS9-G, PS22-C, PS30-G | 1 OR 2 |
| 221 | PS9-G, PS23-A, PS30-G | 1 OR 2 |
| 222 | PS5-C, PS6-C, PS19-T | 1 OR 2 |
| 223 | PS5-C, PS6-C, PS20-T | 1 OR 2 |
| 224 | PS5-C, PS6-C, PS23-A | 1 OR 2 |
| 225 | PS6-C, PS10-T, PS23-A | 1 OR 2 |
| 226 | PS6-C, PS18-G, PS19-T | 1 OR 2 |
| 227 | PS6-C, PS18-G, PS20-T | 1 OR 2 |
| 228 | PS6-C, PS16-T, PS30-G | 1 OR 2 |
| 229 | PS6-C, PS16-T, PS33-T | 1 OR 2 |
| 230 | PS6-C, PS16-T, PS34-G | 1 OR 2 |
| 231 | PS6-C, PS19-T, PS27-C | 1 OR 2 |
| 232 | PS6-C, PS19-T, PS30-G | 1 OR 2 |
| 233 | PS6-C, PS19-T, PS33-T | 1 OR 2 |
| 234 | PS6-C, PS19-T, PS34-G | 1 OR 2 |
| 235 | PS6-C, PS20-T, PS27-C | 1 OR 2 |
| 236 | PS6-C, PS20-T, PS30-G | 1 OR 2 |
| 237 | PS6-C, PS20-T, PS33-T | 1 OR 2 |
| 238 | PS6-C, PS20-T, PS34-G | 1 OR 2 |
| 239 | PS6-C, PS19-T, PS32-A | 1 OR 2 |
| 240 | PS6-C, PS20-T, PS32-A | 1 OR 2 |
| 241 | PS6-C, PS19-T, PS38-T | 1 OR 2 |
| 242 | PS6-C, PS20-T, PS38-T | 1 OR 2 |
| 243 | PS6-C, PS23-A | 1 OR 2 |
| 244 | PS6-C, PS22-C, PS27-C | 1 OR 2 |
| 245 | PS6-C, PS22-C, PS28-A | 1 OR 2 |
| 246 | PS6-C, PS22-C, PS30-G | 1 OR 2 |
| 247 | PS6-C, PS22-C, PS33-T | 1 OR 2 |
| 248 | PS6-C, PS22-C, PS34-G | 1 OR 2 |
| 249 | PS6-C, PS23-A, PS24-C | 1 OR 2 |
| 250 | PS6-C, PS23-A, PS27-C | 1 OR 2 |
| 251 | PS6-C, PS23-A, PS28-A | 1 OR 2 |
| 252 | PS6-C, PS23-A, PS30-G | 1 OR 2 |
| 253 | PS6-C, PS23-A, PS33-T | 1 OR 2 |
| 254 | PS6-C, PS23-A, PS34-G | 1 OR 2 |
| 255 | PS6-C, PS22-C, PS31-G | 1 OR 2 |
| 256 | PS6-C, PS23-A, PS29-A | 1 OR 2 |
| 257 | PS6-C, PS23-A, PS31-G | 1 OR 2 |
| 258 | PS6-C, PS24-C, PS38-T | 1 OR 2 |
| 259 | PS6-C, PS27-C | 1 OR 2 |
| 260 | PS6-C, PS28-A, PS38-T | 1 OR 2 |
| 261 | PS6-C, PS30-G | 1 OR 2 |
| 262 | PS6-C, PS34-G | 1 OR 2 |
| 263 | PS6-C, PS7-A, PS19-T | 1 OR 2 |
| 264 | PS6-C, PS7-A, PS20-T | 1 OR 2 |
| 265 | PS6-C, PS13-T, PS26-G | 1 OR 2 |
| 266 | PS6-C, PS13-T, PS27-C | 1 OR 2 |
| 267 | PS6-C, PS13-T, PS30-G | 1 OR 2 |
| 268 | PS6-C, PS13-T, PS33-T | 1 OR 2 |
| 269 | PS6-C, PS13-T, PS34-G | 1 OR 2 |
| 270 | PS6-C, PS13-T, PS37-T | 1 OR 2 |
| 271 | PS6-C, PS13-T, PS38-T | 1 OR 2 |
| 272 | PS6-C, PS16-T, PS26-G | 1 OR 2 |
| 273 | PS6-C, PS16-T, PS37-T | 1 OR 2 |
| 274 | PS6-C, PS19-T, PS26-G | 1 OR 2 |
| 275 | PS6-C, PS19-T, PS37-T | 1 OR 2 |
| 276 | PS6-C, PS20-T, PS26-G | 1 OR 2 |
| 277 | PS6-C, PS20-T, PS37-T | 1 OR 2 |
| 278 | PS6-C, PS8-G, PS37-T | 1 OR 2 |
| 279 | PS6-C, PS9-A, PS26-G | 1 OR 2 |
| 280 | PS6-C, PS9-A, PS27-C | 1 OR 2 |
| 281 | PS6-C, PS9-A, PS30-G | 1 OR 2 |
| 282 | PS6-C, PS9-A, PS33-T | 1 OR 2 |
| 283 | PS6-C, PS9-A, PS34-G | 1 OR 2 |
| 284 | PS6-C, PS9-A, PS37-T | 1 OR 2 |
| 285 | PS6-C, PS9-A, PS38-T | 1 OR 2 |
| 286 | PS6-C, PS8-G, PS30-G | 1 OR 2 |
| 287 | PS6-C, PS8-G, PS33-T | 1 OR 2 |
| 288 | PS6-C, PS8-G, PS34-G | 1 OR 2 |
| 289 | PS6-C, PS8-G, PS38-T | 1 OR 2 |
| 290 | PS7-A, PS10-T, PS23-A | 1 OR 2 |
| 291 | PS7-A, PS19-T | 1 OR 2 |
| 292 | PS7-A, PS20-T | 1 OR 2 |
| 293 | PS7-A, PS23-A | 1 OR 2 |
| 294 | PS7-T, PS36-T, PS37-C | 1 OR 2 |
| 295 | PS8-G, PS10-T, PS27-C | 1 OR 2 |
| 296 | PS8-G, PS10-T, PS30-G | 1 OR 2 |
| 297 | PS8-G, PS10-T, PS33-T | 1 OR 2 |
| 298 | PS8-G, PS10-T, PS34-G | 1 OR 2 |
| 299 | PS8-G, PS10-T, PS38-T | 1 OR 2 |
| 300 | PS8-G, PS13-T, PS27-C | 1 OR 2 |
| 301 | PS8-G, PS13-T, PS30-G | 1 OR 2 |
| 302 | PS8-G, PS13-T, PS33-T | 1 OR 2 |
| 303 | PS8-G, PS13-T, PS34-G | 1 OR 2 |
| 304 | PS8-G, PS13-T, PS38-T | 1 OR 2 |
| 305 | PS8-G, PS27-C, PS29-A | 1 OR 2 |
| 306 | PS8-G, PS27-C, PS31-G | 1 OR 2 |
| 307 | PS8-G, PS29-A, PS30-G | 1 OR 2 |
| 308 | PS8-G, PS29-A, PS33-T | 1 OR 2 |
| 309 | PS8-G, PS29-A, PS34-G | 1 OR 2 |
| 310 | PS8-G, PS29-A, PS38-T | 1 OR 2 |
| 311 | PS8-G, PS30-G, PS31-G | 1 OR 2 |
| 312 | PS8-G, PS31-G, PS33-T | 1 OR 2 |
| 313 | PS8-G, PS31-G, PS34-G | 1 OR 2 |
| 314 | PS8-G, PS31-G, PS38-T | 1 OR 2 |
| 315 | PS8-G, PS37-T | 1 OR 2 |
| 316 | PS8-G, PS9-A, PS27-C | 1 OR 2 |
| 317 | PS8-G, PS9-A, PS30-G | 1 OR 2 |
| 318 | PS8-G, PS9-A, PS33-T | 1 OR 2 |
| 319 | PS8-G, PS9-A, PS34-G | 1 OR 2 |
| 320 | PS8-G, PS9-A, PS38-T | 1 OR 2 |
| 321 | PS8-G, PS30-G | 1 OR 2 |
| 322 | PS8-G, PS33-T | 1 OR 2 |
| 323 | PS8-G, PS34-G | 1 OR 2 |
| 324 | PS8-G, PS38-T | 1 OR 2 |

TABLE A-10
Markers in LAMA4 Gene Associated
with Better Antidepressant Response

| | | Copy |
|---|---|---|
| Marker | Polymorphisms | Number |
| 1 | PS8-G | 1 OR 2 |
| 2 | PS3-T, PS8-G | 1 OR 2 |
| 3 | PS4-T, PS7-A, PS11-T | 0 OR 1 |
| 4 | PS4-T, PS10-A, PS11-T | 0 OR 1 |
| 5 | PS4-T, PS11-T | 0 OR 1 |
| 6 | PS5-G, PS9-A | 1 OR 2 |
| 7 | PS6-G, PS9-A | 1 OR 2 |
| 8 | PS9-A | 1 OR 2 |
| 9 | PS11-C | 1 OR 2 |
| 10 | PS1-A, PS5-G, PS9-A | 1 OR 2 |
| 11 | PS2-G, PS9-T | 0 OR 1 |

TABLE A-11
Markers in MAPK1 Gene Associated
with Better Antidepressant Response

| | | Copy |
|---|---|---|
| Marker | Polymorphisms | Number |
| 1 | PS1-G | 1 OR 2 |
| 2 | PS2-G | 1 OR 2 |
| 3 | PS2-G, PS5-G | 1 OR 2 |
| 4 | PS13-C | 1 OR 2 |
| 5 | PS7-G | 1 OR 2 |
| 6 | PS3-G, PS14-T | 1 OR 2 |
| 7 | PS4-G, PS13-C | 1 OR 2 |
| 8 | PS4-G, PS7-G | 1 OR 2 |
| 9 | PS1-G, PS12-A | 1 OR 2 |
| 10 | PS1-G, PS13-C | 1 OR 2 |
| 11 | PS1-G, PS5-G | 1 OR 2 |
| 12 | PS8-G, PS13-C | 1 OR 2 |
| 13 | PS9-C, PS13-C | 1 OR 2 |
| 14 | PS10-G, PS13-C | 1 OR 2 |
| 15 | PS11-C, PS13-C | 1 OR 2 |
| 16 | PS2-G, PS13-C | 1 OR 2 |
| 17 | PS3-G, PS13-C | 1 OR 2 |
| 18 | PS6-T, PS13-C | 1 OR 2 |
| 19 | PS1-G, PS4-G, PS12-A | 1 OR 2 |
| 20 | PS1-G, PS4-G, PS13-C | 1 OR 2 |
| 21 | PS1-G, PS4-G, PS5-G | 1 OR 2 |
| 22 | PS2-G, PS4-G, PS13-C | 1 OR 2 |
| 23 | PS3-G, PS4-G, PS13-C | 1 OR 2 |
| 24 | PS4-G, PS8-G, PS13-C | 1 OR 2 |
| 25 | PS4-G, PS9-C, PS13-C | 1 OR 2 |
| 26 | PS4-G, PS10-G, PS13-C | 1 OR 2 |
| 27 | PS4-G, PS11-C, PS13-C | 1 OR 2 |
| 28 | PS4-G, PS6-T, PS13-C | 1 OR 2 |

TABLE A-12
Markers in NPY1R Gene Associated with
Better Antidepressant Response

| | | Copy |
|---|---|---|
| Marker | Polymorphisms | Number |
| 1 | PS1-C, PS3-T, PS8-A | 1 OR 2 |
| 2 | PS1-C, PS3-T, PS7-T | 1 OR 2 |
| 3 | PS2-G, PS3-T, PS8-T | 0 OR 1 |
| 4 | PS3-T, PS8-A | 1 OR 2 |
| 5 | PS3-T, PS4-A, PS7-T | 1 OR 2 |
| 6 | PS3-T, PS5-T, PS7-T | 1 OR 2 |
| 7 | PS3-T, PS6-G, PS7-T | 1 OR 2 |
| 8 | PS3-T, PS7-T | 1 OR 2 |
| 9 | PS4-A, PS7-T | 1 OR 2 |
| 10 | PS7-T | 1 OR 2 |
| 11 | PS1-C, PS7-T | 1 OR 2 |
| 12 | PS8-A | 1 OR 2 |
| 13 | PS2-G, PS8-T | 0 OR 1 |
| 14 | PS5-T, PS7-T | 1 OR 2 |

TABLE A-13
Markers in OPRD1 Gene Associated with
Better Antidepressant Response

| | | Copy |
|---|---|---|
| Marker | Polymorphisms | Number |
| 1 | PS10-T, PS12-A, PS14-A | 2 |
| 2 | PS13-G, PS14-T | 0 |
| 3 | PS3-T, PS12-A, PS14-A | 2 |
| 4 | PS3-T, PS4-T, PS14-A | 2 |
| 5 | PS4-T, PS6-C, PS13-A | 2 |
| 6 | PS1-G, PS4-C, PS14-A | 0 |
| 7 | PS12-A, PS14-A | 2 |
| 8 | PS2-A, PS12-A, PS14-A | 2 |
| 9 | PS2-A, PS4-T, PS14-A | 2 |
| 10 | PS4-C, PS11-A, PS14-A | 0 |
| 11 | PS4-T, PS6-C, PS14-A | 2 |
| 12 | PS6-C, PS12-A, PS14-A | 2 |
| 13 | PS3-T, PS9-G, PS14-A | 2 |
| 14 | PS3-T, PS5-A, PS14-A | 2 |
| 15 | PS3-T, PS7-G, PS14-A | 2 |
| 16 | PS3-T, PS8-A, PS14-A | 2 |
| 17 | PS6-C, PS9-G, PS13-A | 2 |
| 18 | PS2-A, PS9-G, PS14-A | 2 |
| 19 | PS2-A, PS5-A, PS14-A | 2 |
| 20 | PS2-A, PS7-G, PS14-A | 2 |
| 21 | PS2-A, PS8-A, PS14-A | 2 |
| 22 | PS4-T, PS10-T, PS14-A | 2 |
| 23 | PS5-A, PS10-T, PS14-A | 2 |
| 24 | PS5-A, PS6-C, PS14-A | 2 |
| 25 | PS7-G, PS10-T, PS14-A | 2 |
| 26 | PS8-A, PS10-T, PS14-A | 2 |

TABLE A-14
Markers in OPRM1 Gene Associated
with Better Antidepressant Response

| | | Copy |
|---|---|---|
| Marker | Polymorphisms | Number |
| 1 | PS7-C, PS28-C | 0 |
| 2 | PS9-G, PS33-T, PS35-A | 1 OR 2 |
| 3 | PS12-C, PS31-G, PS35-A | 1 OR 2 |
| 4 | PS12-C, PS34-G, PS35-A | 1 OR 2 |
| 5 | PS14-A, PS31-G, PS35-A | 1 OR 2 |
| 6 | PS14-A, PS34-G, PS35-A | 1 OR 2 |
| 7 | PS20-T, PS34-G, PS35-A | 1 OR 2 |
| 8 | PS23-C, PS31-G, PS35-A | 1 OR 2 |
| 9 | PS23-C, PS34-G, PS35-A | 1 OR 2 |
| 10 | PS23-C, PS34-G, PS37-A | 1 OR 2 |
| 11 | PS23-C, PS34-G, PS41-A | 1 OR 2 |
| 12 | PS26-G, PS38-C | 0 OR 1 |
| 13 | PS31-G, PS34-G, PS35-A | 1 OR 2 |
| 14 | PS31-G, PS35-A | 1 OR 2 |
| 15 | PS34-G, PS35-A | 1 OR 2 |
| 16 | PS35-A, PS37-A, PS39-C | 1 OR 2 |
| 17 | PS38-A | 1 OR 2 |
| 18 | PS9-G, PS31-G, PS35-A | 1 OR 2 |
| 19 | PS14-A, PS33-T, PS35-A | 1 OR 2 |
| 20 | PS21-G, PS31-G, PS35-A | 1 OR 2 |
| 21 | PS24-G, PS38-C | 0 OR 1 |
| 22 | PS26-G, PS30-C | 0 OR 1 |
| 23 | PS29-A, PS30-C | 0 OR 1 |
| 24 | PS29-A, PS38-C | 0 OR 1 |
| 25 | PS31-G, PS35-A, PS40-G | 1 OR 2 |
| 26 | PS31-G, PS36-T, PS37-A | 1 OR 2 |
| 27 | PS31-G, PS36-T, PS40-G | 1 OR 2 |
| 28 | PS33-T, PS35-A | 1 OR 2 |
| 29 | PS33-T, PS36-T, PS40-G | 1 OR 2 |
| 30 | PS5-G, PS8-G, PS28-C | 1 OR 2 |
| 31 | PS5-G, PS16-A, PS28-C | 1 OR 2 |
| 32 | PS6-C, PS8-G, PS28-C | 1 OR 2 |
| 33 | PS6-C, PS16-A, PS28-C | 1 OR 2 |
| 34 | PS8-G, PS13-G, PS28-C | 1 OR 2 |
| 35 | PS11-G, PS28-C | 1 OR 2 |
| 36 | PS1-C, PS8-G, PS28-C | 1 OR 2 |
| 37 | PS1-C, PS9-G, PS28-C | 1 OR 2 |
| 38 | PS1-C, PS10-T, PS28-C | 1 OR 2 |
| 39 | PS1-C, PS12-C, PS28-C | 1 OR 2 |
| 40 | PS1-C, PS14-A, PS28-C | 1 OR 2 |
| 41 | PS1-C, PS15-G, PS28-C | 1 OR 2 |
| 42 | PS1-C, PS16-A, PS28-C | 1 OR 2 |
| 43 | PS1-C, PS17-C, PS28-C | 1 OR 2 |
| 44 | PS1-C, PS18-T, PS28-C | 1 OR 2 |
| 45 | PS1-C, PS19-A, PS28-C | 1 OR 2 |
| 46 | PS13-G, PS16-A, PS28-C | 1 OR 2 |
| 47 | PS2-A, PS8-G, PS28-C | 1 OR 2 |
| 48 | PS2-A, PS9-G, PS28-C | 1 OR 2 |
| 49 | PS2-A, PS10-T, PS28-C | 1 OR 2 |
| 50 | PS2-A, PS12-C, PS28-C | 1 OR 2 |
| 51 | PS2-A, PS14-A, PS28-C | 1 OR 2 |
| 52 | PS2-A, PS15-G, PS28-C | 1 OR 2 |
| 53 | PS2-A, PS16-A, PS28-C | 1 OR 2 |
| 54 | PS2-A, PS17-C, PS28-C | 1 OR 2 |
| 55 | PS2-A, PS18-T, PS28-C | 1 OR 2 |
| 56 | PS2-A, PS19-A, PS28-C | 1 OR 2 |
| 57 | PS3-T, PS8-G, PS28-C | 1 OR 2 |
| 58 | PS3-T, PS9-G, PS28-C | 1 OR 2 |
| 59 | PS3-T, PS10-T, PS28-C | 1 OR 2 |
| 60 | PS3-T, PS12-C, PS28-C | 1 OR 2 |
| 61 | PS3-T, PS14-A, PS28-C | 1 OR 2 |
| 62 | PS3-T, PS15-G, PS28-C | 1 OR 2 |
| 63 | PS3-T, PS16-A, PS28-C | 1 OR 2 |
| 64 | PS3-T, PS17-C, PS28-C | 1 OR 2 |
| 65 | PS3-T, PS18-T, PS28-C | 1 OR 2 |
| 66 | PS3-T, PS19-A, PS28-C | 1 OR 2 |
| 67 | PS4-C, PS8-G, PS28-C | 1 OR 2 |
| 68 | PS4-C, PS9-G, PS28-C | 1 OR 2 |
| 69 | PS4-C, PS10-T, PS28-C | 1 OR 2 |
| 70 | PS4-C, PS12-C, PS28-C | 1 OR 2 |
| 71 | PS4-C, PS14-A, PS28-C | 1 OR 2 |
| 72 | PS4-C, PS15-G, PS28-C | 1 OR 2 |
| 73 | PS4-C, PS16-A, PS28-C | 1 OR 2 |
| 74 | PS4-C, PS17-C, PS28-C | 1 OR 2 |
| 75 | PS4-C, PS18-T, PS28-C | 1 OR 2 |
| 76 | PS4-C, PS19-A, PS28-C | 1 OR 2 |
| 77 | PS10-T, PS33-T, PS35-A | 1 OR 2 |
| 78 | PS17-C, PS33-T, PS35-A | 1 OR 2 |
| 79 | PS9-G, PS31-G, PS35-A | 1 OR 2 |
| 80 | PS9-G, PS32-T, PS35-A | 1 OR 2 |
| 81 | PS10-T, PS31-G, PS35-A | 1 OR 2 |
| 82 | PS10-T, PS32-T, PS35-A | 1 OR 2 |
| 83 | PS12-C, PS32-T, PS35-A | 1 OR 2 |
| 84 | PS15-G, PS31-G, PS35-A | 1 OR 2 |
| 85 | PS15-G, PS32-T, PS35-A | 1 OR 2 |
| 86 | PS17-C, PS31-G, PS35-A | 1 OR 2 |
| 87 | PS17-C, PS32-T, PS35-A | 1 OR 2 |
| 88 | PS18-T, PS31-G, PS35-A | 1 OR 2 |
| 89 | PS18-T, PS32-T, PS35-A | 1 OR 2 |
| 90 | PS19-A, PS31-G, PS35-A | 1 OR 2 |
| 91 | PS19-A, PS32-T, PS35-A | 1 OR 2 |
| 92 | PS9-G, PS34-G, PS35-A | 1 OR 2 |
| 93 | PS10-T, PS34-G, PS35-A | 1 OR 2 |
| 94 | PS15-G, PS34-G, PS35-A | 1 OR 2 |
| 95 | PS17-C, PS34-G, PS35-A | 1 OR 2 |
| 96 | PS18-T, PS34-G, PS35-A | 1 OR 2 |
| 97 | PS19-A, PS34-G, PS35-A | 1 OR 2 |
| 98 | PS14-A, PS32-T, PS35-A | 1 OR 2 |
| 99 | PS25-T, PS34-G, PS35-A | 1 OR 2 |
| 100 | PS23-C, PS32-T, PS35-A | 1 OR 2 |
| 101 | PS32-T, PS34-G, PS35-A | 1 OR 2 |
| 102 | PS32-T, PS35-A | 1 OR 2 |
| 103 | PS21-G, PS32-T, PS35-A | 1 OR 2 |
| 104 | PS27-T, PS31-G, PS35-A | 1 OR 2 |
| 105 | PS27-T, PS32-T, PS35-A | 1 OR 2 |
| 106 | PS32-T, PS36-T, PS37-A | 1 OR 2 |
| 107 | PS32-T, PS36-T, PS40-G | 1 OR 2 |
| 108 | PS22-T, PS34-G, PS35-A | 1 OR 2 |

TABLE A-15
Markers in PER3 Gene Associated with
Better Antidepressant Response

| | | Copy |
|---|---|---|
| Marker | Polymorphisms | Number |
| 1 | PS1-C, PS12-T, PS24-4 | 0 |
| 2 | PS1-C, PS7-T, PS24-4 | 0 |
| 3 | PS1-T | 2 |
| 4 | PS9-C, PS12-T, PS24-4 | 0 |
| 5 | PS10-G, PS17-A | 2 |
| 6 | PS12-T, PS16-A, PS24-4 | 0 |
| 7 | PS12-T, PS24-4 | 0 |
| 8 | PS19-G | 0 |
| 9 | PS3-G, PS12-T, PS24-4 | 0 |
| 10 | PS6-C, PS10-G, PS14-G | 2 |
| 11 | PS6-C, PS10-G, PS17-A | 2 |
| 12 | PS1-C, PS12-T | 0 |
| 13 | PS1-C, PS3-G, PS12-T | 0 |
| 14 | PS10-G, PS13-T | 2 |
| 15 | PS10-G, PS17-A, PS21-G | 2 |
| 16 | PS12-T, PS19-G | 0 |
| 17 | PS12-T, PS19-G, PS22-G | 0 |
| 18 | PS12-T, PS22-G, PS24-4 | 0 |
| 19 | PS3-G, PS12-T, PS19-G | 0 |
| 20 | PS3-G, PS7-T, PS24-4 | 0 |
| 21 | PS7-T, PS9-C, PS24-4 | 0 |
| 22 | PS7-T, PS24-4 | 0 |
| 23 | PS1-C, PS18-C, PS24-4 | 1 OR 2 |
| 24 | PS1-C, PS24-4, PS27-A | 1 OR 2 |
| 25 | PS12-T, PS19-G, PS24-4 | 1 OR 2 |
| 26 | PS12-T, PS24-4, PS25-C | 1 OR 2 |
| 27 | PS18-C, PS19-G, PS24-4 | 1 OR 2 |
| 28 | PS18-C, PS24-4, PS25-C | 1 OR 2 |
| 29 | PS19-G, PS24-4, PS27-A | 1 OR 2 |
| 30 | PS24-4, PS25-C, PS27-A | 1 OR 2 |
| 31 | PS7-T, PS19-G, PS24-4 | 1 OR 2 |
| 32 | PS7-T, PS24-4, PS25-C | 1 OR 2 |
| 33 | PS10-G, PS12-T, PS17-A | 2 |
| 34 | PS10-G, PS17-A, PS18-C | 2 |
| 35 | PS10-G, PS17-A, PS27-A | 2 |
| 36 | PS12-T, PS13-T, PS29-G | 2 |
| 37 | PS12-T, PS15-C, PS17-A | 2 |
| 38 | PS12-T, PS17-A, PS29-G | 2 |
| 39 | PS13-T, PS18-C, PS29-G | 2 |
| 40 | PS13-T, PS27-A, PS29-G | 2 |
| 41 | PS15-C, PS17-A, PS18-C | 2 |
| 42 | PS15-C, PS17-A, PS27-A | 2 |
| 43 | PS2-A, PS12-T, PS29-G | 2 |
| 44 | PS2-A, PS18-C, PS29-G | 2 |
| 45 | PS2-A, PS27-A, PS29-G | 2 |
| 46 | PS2-A, PS7-T, PS29-G | 2 |
| 47 | PS2-A, PS8-T | 2 |
| 48 | PS17-A, PS18-C, PS29-G | 2 |
| 49 | PS17-A, PS27-A, PS29-G | 2 |
| 50 | PS19-C | 2 |
| 51 | PS25-G | 2 |
| 52 | PS4-C, PS12-T, PS29-G | 2 |
| 53 | PS4-C, PS18-C, PS29-G | 2 |
| 54 | PS4-C, PS27-A, PS29-G | 2 |
| 55 | PS4-C, PS7-T, PS29-G | 2 |
| 56 | PS4-C, PS8-T | 2 |
| 57 | PS5-C, PS12-T, PS29-G | 2 |
| 58 | PS5-C, PS18-C, PS29-G | 2 |
| 59 | PS5-C, PS27-A, PS29-G | 2 |
| 60 | PS5-C, PS7-T, PS29-G | 2 |
| 61 | PS5-C, PS8-T | 2 |
| 62 | PS7-T, PS13-T, PS29-G | 2 |
| 63 | PS7-T, PS17-A, PS29-G | 2 |
| 64 | PS8-T, PS11-C, PS14-G | 2 |
| 65 | PS8-T, PS11-C, PS20-C | 2 |
| 66 | PS8-T, PS11-C, PS28-G | 2 |
| 67 | PS8-T, PS13-T | 2 |
| 68 | PS8-T, PS17-A | 2 |
| 69 | PS9-C, PS18-C, PS24-4 | 1 OR 2 |
| 70 | PS9-C, PS24-4, PS27-A | 1 OR 2 |
| 71 | PS15-C, PS17-A | 2 |
| 72 | PS16-A, PS18-C, PS24-4 | 1 OR 2 |
| 73 | PS16-A, PS24-4, PS27-A | 1 OR 2 |
| 74 | PS18-C, PS24-4 | 1 OR 2 |
| 75 | PS24-4, PS27-A | 1 OR 2 |
| 76 | PS1-C | 1 OR 2 |
| 77 | PS25-C | 1 OR 2 |
| 78 | PS3-G, PS9-C, PS23-G | 1 OR 2 |
| 79 | PS3-G, PS9-C, PS26-T | 1 OR 2 |
| 80 | PS3-G, PS18-C, PS24-4 | 1 OR 2 |
| 81 | PS3-G, PS24-4, PS27-A | 1 OR 2 |
| 82 | PS6-C, PS14-G, PS15-C | 2 |
| 83 | PS1-C, PS18-C | 1 OR 2 |
| 84 | PS1-C, PS27-A | 1 OR 2 |
| 85 | PS10-G, PS11-C, PS20-C | 2 |
| 86 | PS10-G, PS11-C, PS28-G | 2 |
| 87 | PS11-C, PS15-C, PS20-C | 2 |
| 88 | PS11-C, PS15-C, PS28-G | 2 |
| 89 | PS13-T, PS15-C | 2 |
| 90 | PS18-C, PS19-G | 1 OR 2 |
| 91 | PS19-G, PS27-A | 1 OR 2 |
| 92 | PS3-G, PS18-C, PS19-G | 1 OR 2 |
| 93 | PS3-G, PS19-G, PS27-A | 1 OR 2 |

TABLE A-16
Markers in PLCB1 Gene Associated
with Better Antidepressant Response

| | | Copy |
|---|---|---|
| Marker | Polymorphisms | Number |
| 1 | PS1-A, PS14-A, PS15-A | 2 |
| 2 | PS1-A, PS15-A, PS17-T | 2 |
| 3 | PS1-A, PS5-A, PS14-A | 2 |
| 4 | PS1-A, PS5-A, PS17-T | 2 |
| 5 | PS14-A, PS15-A | 2 |
| 6 | PS14-A, PS15-A, PS16-T | 2 |
| 7 | PS15-A, PS16-T | 2 |
| 8 | PS15-A, PS17-T | 2 |
| 9 | PS2-A, PS13-C, PS14-A | 2 |
| 10 | PS2-A, PS13-C, PS16-T | 2 |
| 11 | PS2-A, PS13-C, PS17-T | 2 |
| 12 | PS2-A, PS5-A, PS14-A | 2 |
| 13 | PS2-A, PS5-A, PS16-T | 2 |
| 14 | PS2-A, PS5-A, PS17-T | 2 |
| 15 | PS3-G, PS14-A, PS15-A | 2 |
| 16 | PS3-G, PS5-A, PS14-A | 2 |
| 17 | PS4-G, PS14-A, PS15-A | 2 |
| 18 | PS4-G, PS15-A, PS17-T | 2 |
| 19 | PS5-A, PS14-A | 2 |
| 20 | PS5-A, PS14-A, PS16-T | 2 |
| 21 | PS5-A, PS16-T | 2 |
| 22 | PS5-A, PS17-T | 2 |
| 23 | PS1-A, PS13-C, PS14-A | 2 |
| 24 | PS1-A, PS13-C, PS17-T | 2 |
| 25 | PS1-A, PS9-G, PS14-A | 2 |
| 26 | PS1-A, PS10-A, PS14-A | 2 |
| 27 | PS1-A, PS11-A, PS14-A | 2 |
| 28 | PS1-A, PS12-G, PS14-A | 2 |
| 29 | PS1-A, PS6-G, PS14-A | 2 |
| 30 | PS1-A, PS7-G, PS14-A | 2 |
| 31 | PS1-A, PS8-C, PS14-A | 2 |
| 32 | PS4-G, PS9-G, PS14-A | 2 |
| 33 | PS4-G, PS10-A, PS14-A | 2 |
| 34 | PS4-G, PS11-A, PS14-A | 2 |
| 35 | PS4-G, PS12-G, PS14-A | 2 |
| 36 | PS4-G, PS5-A, PS14-A | 2 |
| 37 | PS4-G, PS6-G, PS14-A | 2 |
| 38 | PS4-G, PS7-G, PS14-A | 2 |
| 39 | PS4-G, PS8-C, PS14-A | 2 |
| 40 | PS1-A, PS9-G, PS17-T | 2 |
| 41 | PS1-A, PS10-A, PS17-T | 2 |
| 42 | PS1-A, PS11-A, PS17-T | 2 |
| 43 | PS1-A, PS12-G, PS17-T | 2 |
| 44 | PS1-A, PS6-G, PS17-T | 2 |
| 45 | PS1-A, PS7-G, PS17-T | 2 |
| 46 | PS1-A, PS8-C, PS17-T | 2 |
| 47 | PS4-G, PS9-G, PS17-T | 2 |
| 48 | PS4-G, PS10-A, PS17-T | 2 |
| 49 | PS4-G, PS11-A, PS17-T | 2 |
| 50 | PS4-G, PS12-G, PS17-T | 2 |
| 51 | PS4-G, PS5-A, PS17-T | 2 |
| 52 | PS4-G, PS6-G, PS17-T | 2 |
| 53 | PS4-G, PS7-G, PS17-T | 2 |
| 54 | PS4-G, PS8-C, PS17-T | 2 |
| 55 | PS13-C, PS14-A | 2 |
| 56 | PS13-C, PS14-A, PS16-T | 2 |
| 57 | PS13-C, PS17-T | 2 |
| 58 | PS13-C, PS16-T | 2 |
| 59 | PS2-A, PS14-A, PS15-A | 2 |
| 60 | PS2-A, PS15-A, PS16-T | 2 |
| 61 | PS2-A, PS15-A, PS17-T | 2 |
| 62 | PS2-A, PS9-G, PS14-A | 2 |
| 63 | PS2-A, PS10-A, PS14-A | 2 |
| 64 | PS2-A, PS11-A, PS14-A | 2 |
| 65 | PS2-A, PS12-G, PS14-A | 2 |
| 66 | PS2-A, PS6-G, PS14-A | 2 |
| 67 | PS2-A, PS7-G, PS14-A | 2 |
| 68 | PS2-A, PS8-C, PS14-A | 2 |
| 69 | PS2-A, PS9-G, PS16-T | 2 |
| 70 | PS2-A, PS10-A, PS16-T | 2 |
| 71 | PS2-A, PS11-A, PS16-T | 2 |
| 72 | PS2-A, PS12-G, PS16-T | 2 |
| 73 | PS2-A, PS6-G, PS16-T | 2 |
| 74 | PS2-A, PS7-G, PS16-T | 2 |
| 75 | PS2-A, PS8-C, PS16-T | 2 |
| 76 | PS2-A, PS9-G, PS17-T | 2 |
| 77 | PS2-A, PS10-A, PS17-T | 2 |
| 78 | PS2-A, PS11-A, PS17-T | 2 |
| 79 | PS2-A, PS12-G, PS17-T | 2 |
| 80 | PS2-A, PS6-G, PS17-T | 2 |
| 81 | PS2-A, PS7-G, PS17-T | 2 |
| 82 | PS2-A, PS8-C, PS17-T | 2 |
| 83 | PS3-G, PS13-C, PS14-A | 2 |
| 84 | PS3-G, PS13-C, PS17-T | 2 |
| 85 | PS3-G, PS15-A, PS17-T | 2 |
| 86 | PS3-G, PS9-G, PS14-A | 2 |
| 87 | PS3-G, PS9-G, PS17-T | 2 |
| 88 | PS3-G, PS10-A, PS14-A | 2 |
| 89 | PS3-G, PS10-A, PS17-T | 2 |
| 90 | PS3-G, PS11-A, PS14-A | 2 |
| 91 | PS3-G, PS11-A, PS17-T | 2 |
| 92 | PS3-G, PS12-G, PS14-A | 2 |
| 93 | PS3-G, PS12-G, PS17-T | 2 |
| 94 | PS3-G, PS5-A, PS17-T | 2 |
| 95 | PS3-G, PS6-G, PS14-A | 2 |
| 96 | PS3-G, PS6-G, PS17-T | 2 |
| 97 | PS3-G, PS7-G, PS14-A | 2 |
| 98 | PS3-G, PS7-G, PS17-T | 2 |
| 99 | PS3-G, PS8-C, PS14-A | 2 |
| 100 | PS3-G, PS8-C, PS17-T | 2 |
| 101 | PS4-G, PS13-C, PS14-A | 2 |
| 102 | PS4-G, PS13-C, PS17-T | 2 |
| 103 | PS9-G, PS14-A | 2 |
| 104 | PS10-A, PS14-A | 2 |
| 105 | PS11-A, PS14-A | 2 |
| 106 | PS12-G, PS14-A | 2 |
| 107 | PS6-G, PS14-A | 2 |
| 108 | PS7-G, PS14-A | 2 |
| 109 | PS8-C, PS14-A | 2 |
| 110 | PS9-G, PS14-A, PS16-T | 2 |
| 111 | PS9-G, PS17-T | 2 |
| 112 | PS10-A, PS14-A, PS16-T | 2 |
| 113 | PS10-A, PS17-T | 2 |
| 114 | PS11-A, PS14-A, PS16-T | 2 |
| 115 | PS11-A, PS17-T | 2 |
| 116 | PS12-G, PS14-A, PS16-T | 2 |
| 117 | PS12-G, PS17-T | 2 |
| 118 | PS6-G, PS14-A, PS16-T | 2 |
| 119 | PS6-G, PS17-T | 2 |
| 120 | PS7-G, PS14-A, PS16-T | 2 |
| 121 | PS7-G, PS17-T | 2 |
| 122 | PS8-C, PS14-A, PS16-T | 2 |
| 123 | PS8-C, PS17-T | 2 |
| 124 | PS9-G, PS16-T | 2 |
| 125 | PS10-A, PS16-T | 2 |
| 126 | PS11-A, PS16-T | 2 |
| 127 | PS12-G, PS16-T | 2 |
| 128 | PS6-G, PS16-T | 2 |
| 129 | PS7-G, PS16-T | 2 |
| 130 | PS8-C, PS16-T | 2 |

TABLE A-17
Markers in PSMD1 Associated with
Better Antidepressant Response

| | | Copy |
|---|---|---|
| Marker | Polymorphisms | Number |
| 1 | PS9-G | 1 OR 2 |
| 2 | PS1-C, PS5-G, PS7-G | 0 OR 1 |
| 3 | PS1-C, PS6-A, PS7-G | 0 OR 1 |
| 4 | PS1-C, PS7-G | 0 OR 1 |
| 5 | PS3-A, PS6-A, PS7-G | 0 OR 1 |
| 6 | PS3-A, PS7-G | 0 OR 1 |
| 7 | PS3-A, PS7-G, PS10-T | 0 OR 1 |
| 8 | PS4-A, PS7-A | 1 OR 2 |
| 9 | PS4-A, PS7-A, PS8-G | 1 OR 2 |
| 10 | PS5-G, PS7-G, PS10-T | 0 OR 1 |
| 11 | PS7-A | 1 OR 2 |
| 12 | PS7-A, PS8-G | 1 OR 2 |
| 13 | PS1-C, PS7-G | 2 |
| 14 | PS5-G, PS7-G | 2 |
| 15 | PS5-G, PS6-A, PS7-G | 2 |
| 16 | PS1-C, PS2-G, PS7-G | 2 |
| 17 | PS1-C, PS3-A, PS7-G | 2 |
| 18 | PS1-C, PS7-G, PS10-T | 2 |
| 19 | PS2-G, PS5-G, PS7-G | 2 |
| 20 | PS3-A, PS5-G, PS7-G | 2 |

TABLE A-18
Markers in ABI1 Gene Associated with
Better Antidepressant Response

| | | Copy |
|---|---|---|
| Marker | Polymorphisms | Number |
| 1 | PS1-A | 0 |
| 2 | PS2-T | 2 |
| 3 | PS3-A | 2 |

TABLE A-19
Markers in LOC402382 Gene Associated
with Better Antidepressant Response

| | | Copy |
|---|---|---|
| Marker | Polymorphisms | Number |
| 1 | PS1-T | 1 OR 2 |

TABLE A-20
Markers in NCALD Gene Associated with
Better Antidepressant Response

| | | Copy |
|---|---|---|
| Marker | Polymorphisms | Number |
| 1 | PS1-A | 2 |

TABLE A-21
Polymorphic Sites in the ACE Gene

| | | Position | | |
|---|---|---|---|---|
| PS | | in SEQ | Reference | Variant |
| Number | Poly ID | ID NO: 1 | Allele | Allele |
| 1 | 711180659 | 1327 | G | A |
| 2 | 711180681 | 1504 | G | C |
| 3 | 710922725 | 1633 | T | A |
| 4 | 710921732 | 1780 | C | T |
| 5 | 711088351 | 3105 | G | A |
| 6 | 710921315 | 3737 | C | G |
| 7 | 710920871 | 4455 | C | T |
| 8 | 710922167 | 4639 | C | T |
| 9 | 710923433 | 5261 | C | T |
| 10 | 710922265 | 5359 | C | T |
| 11 | 710920323 | 5378 | C | T |
| 12 | 710923078 | 5837 | G | A |
| 13 | 710920454 | 6390 | C | T |
| 14 | 710923435 | 6395 | G | T |
| 15 | 710921368 | 7258 | C | T |
| 16 | 710920726 | 7362 | C | T |
| 17 | 710920684 | 7488 | G | C |
| 18 | 710922605 | 11491 | A | G |
| 19 | 710922218 | 11720 | T | C |
| 20 | 710923183 | 11961 | T | C |
| 21 | 711205105 | 13330 | — | ATACAGT |
| | | | | CACTTTT |
| | | | | TTTTTTTT |
| | | | | TTTGAGA |
| | | | | CGGAGTC |
| | | | | TCGCTCT |
| | | | | GTCGCCC |
| | | | | AGGCTGG |
| | | | | AGTGCAG |
| | | | | TGGCGGG |
| | | | | ATCTCGG |
| | | | | CTCACTG |
| | | | | CAAGCTC |
| | | | | CGCCTCC |
| | | | | CGGGTTC |
| | | | | ACGCCAT |
| | | | | TCTCCTG |
| | | | | CCTCAGC |
| | | | | CTCCCAA |
| | | | | GTAGCTG |
| | | | | GGACCAC |
| | | | | AGGCGCC |
| | | | | CGCCACT |
| | | | | ACGCCCG |
| | | | | GCTAATT |
| | | | | TTTTGTA |
| | | | | TTTTTAG |
| | | | | TAGAGAC |
| | | | | GGGGTTT |
| | | | | CACCGTT |
| | | | | TTAGCCG |
| | | | | GGATGGT |
| | | | | CTCGATC |
| | | | | TCCTGAC |
| | | | | CTCGTGA |
| | | | | TCCGCCC |
| | | | | GCCTCGG |
| | | | | CCTCCCA |
| | | | | AAGTGCT |
| | | | | GGGATTA |
| | | | | CAGGCGTG |
| 22 | 711168334 | 13430 | G | C |
| 23 | 711168332 | 13438 | A | C |
| 24 | 711165639 | 16121 | G | A |
| 25 | 710921830 | 16245 | C | G |
| 26 | 710922422 | 18650 | C | T |
| 27 | 710923604 | 18892 | C | T |
| 28 | 710922379 | 18910 | C | T |
| 29 | 710921390 | 19070 | C | T |
| 30 | 710923235 | 19347 | G | A |
| 31 | 711168450 | 21791 | C | T |
| 32 | 711088695 | 25488 | T | C |
| 33 | 711088593 | 31196 | C | T |
| 34 | 711049196 | 32067 | T | C |
| 35 | 711049198 | 32160 | A | T |
| 36 | 711088813 | 36705 | T | C |
| 37 | 711088713 | 45558 | T | C |

TABLE A-22
Polymorphic Sites in the ATP5G3 Gene

| | | Position | | |
|---|---|---|---|---|
| PS | | in SEQ | Reference | Variant |
| Number | Poly ID | ID NO: 2 | Allele | Allele |
| 1 | 710908281 | 5810 | T | C |
| 2 | 711089030 | 10530 | C | T |

TABLE A-23
Polymorphic Sites in the BCL2L1 Gene

| | | Position | | |
|---|---|---|---|---|
| PS | | in SEQ | Reference | Variant |
| Number | Poly ID | ID NO: 3 | Allele | Allele |
| 1 | 710946639 | 273 | A | G |
| 2 | 710946636 | 12963 | C | T |
| 3 | 710946633 | 24774 | A | G |
| 4 | 710946624 | 31091 | T | C |
| 5 | 710946630 | 36225 | G | C |
| 6 | 710988411 | 45435 | C | G |
| 7 | 710946642 | 47751 | G | T |
| 8 | 710946645 | 47852 | T | C |

TABLE A-24
Polymorphic Sites in the CYP2C9 Gene

| | | Position | | |
|---|---|---|---|---|
| PS | | in SEQ | Reference | Variant |
| Number | Poly ID | ID NO: 4 | Allele | Allele |
| 1 | 13819187 | 312 | T | C |
| 2 | 710859989 | 2512 | T | C |

TABLE A-25
Polymorphic Sites in the DRD3 Gene

| | | Position | | |
|---|---|---|---|---|
| PS | | in SEQ | Reference | Variant |
| Number | Poly ID | ID NO: 5 | Allele | Allele |
| 1 | 711094203 | 1001 | T | C |
| 2 | 711071938 | 9672 | G | C |
| 3 | 711071941 | 10036 | G | A |
| 4 | 711067311 | 20208 | G | A |
| 5 | 711067300 | 21659 | C | T |
| 6 | 711067330 | 45425 | C | T |
| 7 | 711067341 | 45460 | G | C |
| 8 | 711071897 | 48490 | G | T |
| 9 | 710904614 | 54113 | A | G |
| 10 | 711093394 | 55208 | A | T |

TABLE A-26
Polymorphic Sites in the FOS Gene

| | | Position | | |
|---|---|---|---|---|
| PS | | in SEQ | Reference | Variant |
| Number | Poly ID | ID NO: 6 | Allele | Allele |
| 1 | 637600079 | 1001 | C | T |
| 2 | 631698600 | 4876 | T | C |
| 3 | 631698669 | 6762 | G | C |
| 4 | 710974724 | 9125 | G | A |
| 5 | 711093638 | 9569 | T | C |
| 6 | 711094752 | 9871 | G | T |

TABLE A-27
Polymorphic Sites in the DTNBP1 Gene

| | | Position | | |
|---|---|---|---|---|
| PS | | in SEQ | Reference | Variant |
| Number | Poly ID | ID NO: 7 | Allele | Allele |
| 1 | 636094934 | 561 | T | G |
| 2 | 636094940 | 1758 | C | T |
| 3 | 636094950 | 3078 | C | T |
| 4 | 636094952 | 3408 | G | A |
| 5 | 711022632 | 15415 | T | C |
| 6 | 636094969 | 26657 | G | C |
| 7 | 711022607 | 28324 | G | A |
| 8 | 711022598 | 29448 | G | T |
| 9 | 636094987 | 38573 | C | T |
| 10 | 711022507 | 53395 | G | C |
| 11 | 711022388 | 54311 | C | T |
| 12 | 711022397 | 63525 | A | G |
| 13 | 711022513 | 64195 | A | G |
| 14 | 711022368 | 107997 | G | A |
| 15 | 711022453 | 119940 | C | T |
| 16 | 636094993 | 120477 | G | A |
| 17 | 711022525 | 121616 | T | G |
| 18 | 711022353 | 122606 | G | A |
| 19 | 711022531 | 125843 | G | A |
| 20 | 711022582 | 127793 | G | A |
| 21 | 711022483 | 128347 | A | G |
| 22 | 711022348 | 129053 | G | A |
| 23 | 711166842 | 129549 | G | A |
| 24 | 711022342 | 130762 | C | T |

TABLE A-28
Polymorphic Sites in the GABRG3 Gene

| | | Position | | |
|---|---|---|---|---|
| PS | | in SEQ | Reference | Variant |
| Number | Poly ID¹ | ID NO: 8 | Allele | Allele |
| 1 | 710975524 | 632 | G | A |
| 2 | 710975811 | 3472 | C | G |
| 3 | 710975786 | 3745 | T | C |
| 4 | 710975711 | 10975 | A | G |
| 5 | 710975693 | 15371 | T | C |
| 6 | 710975672 | 26644 | G | C |
| 7 | 710975675 | 27987 | C | T |
| 8 | 710975394 | 58104 | C | T |
| 9 | 710975741 | 65440 | A | G |
| 10 | 711106453 | 71334 | C | G |
| 11 | 710975501 | 88634 | C | T |
| 12 | 711106510 | 89236 | T | C |
| 13 | 711106601 | 109805 | G | A |

TABLE A-29
Polymorphic Sites in the GRIA4 Gene

| | | Position | | |
|---|---|---|---|---|
| PS | | in SEQ | Reference | Variant |
| Number | Poly ID | ID NO: 9 | Allele | Allele |
| 1 | 710895723 | 319 | G | A |
| 2 | 710896154 | 1773 | C | A |
| 3 | 711075244 | 6531 | G | C |
| 4 | 710896109 | 7053 | C | T |
| 5 | 710895742 | 9459 | C | T |
| 6 | 710991292 | 9476 | C | T |
| 7 | 710895901 | 10399 | A | T |
| 8 | 710895857 | 37646 | G | A |
| 9 | 710895878 | 48580 | A | G |
| 10 | 710895937 | 48899 | T | C |
| 11 | 710895727 | 53344 | C | T |
| 12 | 710991328 | 54844 | G | T |
| 13 | 710895847 | 64853 | T | C |
| 14 | 710896120 | 65601 | A | G |
| 15 | 710896024 | 69274 | T | C |
| 16 | 710895714 | 69431 | T | C |
| 17 | 710895481 | 74432 | A | G |
| 18 | 710895370 | 74502 | G | T |
| 19 | 710895581 | 79472 | T | C |
| 20 | 710896189 | 79527 | T | C |
| 21 | 711082103 | 82663 | G | C |
| 22 | 710895614 | 86802 | T | C |
| 23 | 710896293 | 87205 | G | A |
| 24 | 710895821 | 97223 | C | T |
| 25 | 710896163 | 109718 | T | C |
| 26 | 710895391 | 10606 | A | G |
| 27 | 710991405 | 110803 | G | C |
| 28 | 710895625 | 111346 | A | G |
| 29 | 710895748 | 113316 | A | T |
| 30 | 711075135 | 114730 | A | G |
| 31 | 710896264 | 114822 | G | C |
| 32 | 710895423 | 116449 | A | G |
| 33 | 710896083 | 118530 | C | T |
| 34 | 710895549 | 118881 | A | G |
| 35 | 710895358 | 119398 | C | A |
| 36 | 711075151 | 120310 | T | C |
| 37 | 710991378 | 120753 | C | T |
| 38 | 710895577 | 124233 | T | C |

TABLE A-30
Polymorphic Sites in the LAMA4 Gene

| | | Position | | |
|---|---|---|---|---|
| | | in SEQ | | |
| PS | | ID | Reference | Variant |
| Number | Poly ID | NO: 10 | Allele | Allele |
| 1 | 711078647 | 365 | A | G |
| 2 | 711078281 | 8622 | G | A |
| 3 | 711010712 | 20526 | T | C |
| 4 | 711078147 | 23348 | T | C |
| 5 | 711078547 | 27327 | G | C |
| 6 | 710991918 | 28940 | G | A |
| 7 | 711078371 | 31804 | G | A |
| 8 | 711078573 | 33702 | A | G |
| 9 | 711078198 | 40082 | A | T |
| 10 | 711078261 | 64952 | G | A |
| 11 | 710991840 | 70308 | C | T |

TABLE A-31
Polymorphic Sites in the MAPK1 Gene

| | | Position | | |
|---|---|---|---|---|
| | | in SEQ | | |
| PS | | ID | Reference | Variant |
| Number | Poly ID | NO: 11 | Allele | Allele |
| 1 | 711010538 | 530 | A | G |
| 2 | 711010648 | 8888 | T | G |
| 3 | 710977682 | 13969 | A | G |
| 4 | 711010526 | 19424 | G | A |
| 5 | 710977700 | 24336 | G | T |
| 6 | 711010594 | 26316 | C | T |
| 7 | 710901334 | 52242 | C | G |
| 8 | 710977679 | 56838 | A | G |
| 9 | 710977688 | 68100 | T | C |
| 10 | 710977685 | 69398 | A | G |
| 11 | 710901146 | 83374 | A | C |
| 12 | 710977697 | 92350 | A | G |
| 13 | 711093563 | 103191 | T | C |
| 14 | 711094789 | 103872 | T | C |

TABLE A-32
Polymorphic Sites in the NPY1R Gene

| | | Position | | |
|---|---|---|---|---|
| | | in SEQ | | |
| PS | | ID | Reference | Variant |
| Number | Poly ID | NO: 12 | Allele | Allele |
| 1 | 710980291 | 1001 | T | C |
| 2 | 711060972 | 1080 | G | A |
| 3 | 711060985 | 1615 | T | A |
| 4 | 711018483 | 2307 | T | A |
| 5 | 710988318 | 3314 | G | T |
| 6 | 711018474 | 4924 | A | G |
| 7 | 711018480 | 6939 | T | C |
| 8 | 711093951 | 14354 | T | A |

TABLE A-33
Polymorphic Sites in the OPRD1 Gene

| | | Position | | |
|---|---|---|---|---|
| | | in SEQ | | |
| PS | | ID | Reference | Variant |
| Number | Poly ID | NO: 13 | Allele | Allele |
| 1 | 711018330 | 2928 | G | A |
| 2 | 644381289 | 4327 | G | A |
| 3 | 644381297 | 8360 | C | T |
| 4 | 710967627 | 14417 | T | C |
| 5 | 644381300 | 15016 | A | G |
| 6 | 710967614 | 17427 | T | C |
| 7 | 710967622 | 25637 | G | A |
| 8 | 644381311 | 25740 | A | G |
| 9 | 710967634 | 27754 | G | A |
| 10 | 711018389 | 38224 | C | T |
| 11 | 711018283 | 39385 | A | G |
| 12 | 644381334 | 42096 | A | T |
| 13 | 711018386 | 44697 | A | G |
| 14 | 644381366 | 53568 | T | A |

TABLE A-34
Polymorphic Sites in the OPRM1 Gene

| | | Position | | |
|---|---|---|---|---|
| | | in SEQ | | |
| PS | | ID | Reference | Variant |
| Number | Poly ID | NO: 14 | Allele | Allele |
| 1 | 710914515 | 4010 | C | T |
| 2 | 710914559 | 8702 | A | C |
| 3 | 710914957 | 9409 | T | C |
| 4 | 710914660 | 15715 | C | A |
| 5 | 710915205 | 22359 | G | A |
| 6 | 711070902 | 48590 | C | T |
| 7 | 710914944 | 52627 | G | C |
| 8 | 711070771 | 55186 | A | G |
| 9 | 710992027 | 60535 | T | G |
| 10 | 710914868 | 64174 | C | T |
| 11 | 710914921 | 64943 | A | G |
| 12 | 710992019 | 77336 | C | A |
| 13 | 711070941 | 80139 | G | T |
| 14 | 710991990 | 82587 | A | G |
| 15 | 710992022 | 83298 | G | T |
| 16 | 711070854 | 90472 | C | A |
| 17 | 710992030 | 96810 | C | T |
| 18 | 711070814 | 97661 | T | A |
| 19 | 711068853 | 99573 | A | C |
| 20 | 711067925 | 123768 | T | G |
| 21 | 711069371 | 126262 | G | A |
| 22 | 711067565 | 127937 | T | A |
| 23 | 711070639 | 128043 | C | T |
| 24 | 711067595 | 152156 | G | C |
| 25 | 711070720 | 159260 | T | G |
| 26 | 711067585 | 160222 | G | T |
| 27 | 711067568 | 165085 | T | G |
| 28 | 711067723 | 169236 | G | C |
| 29 | 711067764 | 173459 | A | C |
| 30 | 711070746 | 178716 | C | A |
| 31 | 711067767 | 178981 | A | G |
| 32 | 711067910 | 179035 | C | T |
| 33 | 711067730 | 182068 | G | T |
| 34 | 711067733 | 182243 | A | G |
| 35 | 711070642 | 183113 | A | G |
| 36 | 711070513 | 190771 | T | C |
| 37 | 711067627 | 205957 | G | A |
| 38 | 711070117 | 207984 | C | A |
| 39 | 711067848 | 211170 | C | T |
| 40 | 711094157 | 211273 | G | A |
| 41 | 711067624 | 211885 | G | A |

TABLE A-35
Polymorphic Sites in the PER3 Gene

| | | Position | | |
|---|---|---|---|---|
| | | in SEQ | | |
| PS | | ID | Reference | Variant |
| Number | Poly ID | NO: 15 | Allele | Allele |
| 1 | 20917924 | 2730 | T | C |
| 2 | 710981364 | 3562 | A | C |
| 3 | 710981377 | 5592 | G | A |
| 4 | 710981361 | 7097 | C | T |
| 5 | 710981355 | 7253 | C | T |
| 6 | 710981371 | 7933 | C | T |
| 7 | 634127186 | 9954 | T | C |
| 8 | 613171908 | 25760 | T | C |
| 9 | 711018146 | 28884 | C | T |
| 10 | 613171917 | 36203 | G | A |
| 11 | 710981374 | 36662 | C | T |
| 12 | 711205161 | 37718 | T | G |
| 13 | 710981358 | 41615 | T | C |
| 14 | 20939499 | 43459 | G | A |
| 15 | 25594125 | 44614 | C | G |
| 16 | 25594117 | 44961 | A | G |
| 17 | 613113405 | 45250 | A | G |
| 18 | 710981380 | 45473 | C | T |
| 19 | 711204131 | 46839 | C | G |
| 20 | 25598753 | 46976 | C | T |
| 21 | 711204289 | 46991 | G | A |
| 22 | 711204136 | 47009 | G | T |
| 23 | 711204126 | 47099 | A | G |
| 24 | 711205104 | 47142 | — | GCTCTGT |
| | | | | CCACAGG |
| | | | | ATCGCCT |
| | | | | CCCATGA |
| | | | | AGAATCC |
| | | | | ATCCCAT |
| | | | | CTTACTG |
| | | | | CCAGC |
| 25 | 711018190 | 47992 | G | C |
| 26 | 711018193 | 48119 | A | T |
| 27 | 20931073 | 54169 | A | G |
| 28 | 634127175 | 63044 | G | T |
| 29 | 711061797 | 65924 | G | A |

TABLE A-36
Polymorphic Sites in the PLCB1 Gene

| | | Position | | |
|---|---|---|---|---|
| | | in SEQ | | |
| PS | | ID | Reference | Variant |
| Number | Poly ID | NO: 16 | Allele | Allele |
| 1 | 710981419 | 432 | G | A |
| 2 | 710981416 | 531 | A | T |
| 3 | 710981880 | 12021 | G | C |
| 4 | 710981792 | 18957 | C | G |
| 5 | 710981825 | 23011 | A | G |
| 6 | 710982077 | 23552 | G | A |
| 7 | 710981556 | 24915 | G | A |
| 8 | 710981911 | 27468 | C | T |
| 9 | 710981916 | 27542 | G | T |
| 10 | 710981919 | 27665 | A | T |
| 11 | 710982023 | 28226 | A | G |
| 12 | 710982026 | 28261 | G | C |
| 13 | 710981922 | 29155 | C | T |
| 14 | 710981666 | 30747 | G | A |
| 15 | 710981857 | 34155 | A | G |
| 16 | 710982080 | 35587 | T | C |
| 17 | 710982009 | 37025 | G | T |

TABLE A-37
Polymorphic Sites in the PSMD1 Gene

| | | Position | | |
|---|---|---|---|---|
| | | in SEQ | | |
| PS | | ID | Reference | Variant |
| Number | Poly ID | NO: 17 | Allele | Allele |
| 1 | 711094697 | 1688 | C | T |
| 2 | 710902871 | 23894 | A | G |
| 3 | 711093905 | 25426 | G | A |
| 4 | 710903088 | 30401 | A | G |
| 5 | 711094687 | 51854 | G | T |
| 6 | 711108560 | 60461 | C | A |
| 7 | 711086956 | 63711 | A | G |
| 8 | 711108574 | 64926 | A | G |
| 9 | 711086951 | 66316 | T | G |
| 10 | 710992176 | 96238 | G | T |

TABLE A-38
Polymorphic Sites in the ABI1 Gene

| PS | | Reference | Variant |
|---|---|---|---|
| Number | Position | Allele | Allele |
| 1 | 201 in SEQ ID NO: 18 | G | A |
| 2 | 201 in SEQ ID NO: 19 | T | G |
| 3 | 201 in SEQ ID NO: 20 | A | G |

TABLE A-39
Polymorphic Sites in the LOC402382 Gene

| PS | | Reference | Variant |
|---|---|---|---|
| Number | Position | Allele | Allele |
| 1 | 201 in SEQ ID NO: 21 | C | T |

TABLE A-40
Polymorphic Sites in the NCALD Gene

| PS | | Reference | Variant |
|---|---|---|---|
| Number | Position | Allele | Allele |
| 1 | 201 in SEQ ID NO: 22 | A | G |

What is claimed is:

1. A method of predicting whether an individual will respond to an antidepressant, the method comprising:
(a) determining the presence or absence in the individual of a genetic marker in any of the ACE, ATP5C3, BCL2L1, CYP2C9, DRD3, FOS, DTNBP1, GABRG3, GRIA4, LAMA4, MAPK1, NPY1R, OPRD1, OPRM1, PER3, PLCB1, PSMD1, ABI1, LOC402382, and NCALD genes that is associated with response to the antidepressant; and
(b) making a prediction based on the results of the determining step,
wherein if the marker is present, then the prediction is that the individual is likely to respond better to an antidepressant than an individual in whom the marker is absent, and if the marker is absent, then the prediction is that the individual is less likely to respond better to an antidepressant than an individual in whom the marker is present.

2. The method of claim 1, wherein the antidepressant is selected from the group consisting of a selective serotonin reuptake inhibitor, a serotonin-norepinephrine reuptake inhibitor, a norepinephrine reuptake inhibitor, a tricyclic antidepressant, and a monoamine oxidase inhibitor.

3. The method of claim 2, wherein the antidepressant is a selective serotonin reuptake inhibitor.

4. The method of claim 3, wherein the selective serotonin reuptake inhibitor is vilazodone.

5. A method for treating depression in an individual, the method comprising:
(a) determining the presence or absence in the individual of a genetic marker in any of the ACE, ATP5C3, BCL2L1, CYP2C9, DRD3, FOS, DTNBP1, GABRG3, GRIA4, LAMA4, MAPK1, NPY1R, OPRD1, OPRM1, PER3, PLCB1, PSMD1, ABI1, LOC402382, and NCALD genes that is associated with response to an antidepressant; and
(b) making a treatment decision based on the results of the determining step,
wherein if the marker is present, then the decision is to prescribe to the individual the lowest approved dose of the antidepressant, and if the marker is absent, then the decision is to either prescribe to the individual the antidepressant at a dose that is higher than the lowest approved dose, or a therapy not including the antidepressant that is effective in treating depression.

6. The method of claim 5, wherein the antidepressant is selected from the group consisting of a selective serotonin reuptake inhibitor, a serotonin-norepinephrine reuptake inhibitor, a norepinephrine reuptake inhibitor, a tricyclic antidepressant, and a monoamine oxidase inhibitor.

7. The method of claim 6, wherein the antidepressant is a selective serotonin reuptake inhibitor.

8. The method of claim 7, wherein the selective serotonin reuptake inhibitor is vilazodone.

9. A kit for detecting a genetic marker in any of the ACE, ATP5C3, BCL2L1, CYP2C9, DRD3, FOS, DTNBP1, GABRG3, GRIA4, LAMA4, MAPK1, NPY1R, OPRD1, OPRM1, PER3, PLCB1, PSMD1, ABI1, LOC402382, and NCALD genes that is associated with antidepressant response, the kit comprising a set of oligonucleotides designed for identifying each of the alleles at each polymorphic site (PS) in the marker.

10. The kit of claim 9, wherein the set of oligonucleotides comprises an allele-specific oligonucleotide (ASO) probe for each allele at each PS.

11. The kit of claim 9, wherein the set of oligonucleotides comprises a primer-extension oligonucleotide for each PS.

12. The kit of claim 9, wherein the antidepressant is selected from the group consisting of a selective serotonin reuptake inhibitor, a serotonin-norepinephrine reuptake inhibitor, a norepinephrine reuptake inhibitor, a tricyclic antidepressant, and a monoamine oxidase inhibitor.

13. The kit of claim 12, wherein the antidepressant is a selective serotonin reuptake inhibitor.

14. The kit of claim 13, wherein the selective serotonin reuptake inhibitor is vilazodone.

15. The kit of claim 10, wherein the antidepressant is selected from the group consisting of a selective serotonin reuptake inhibitor, a serotonin-norepinephrine reuptake inhibitor, a norepinephrine reuptake inhibitor, a tricyclic antidepressant, and a monoamine oxidase inhibitor.

16. The kit of claim 15, wherein the antidepressant is a selective serotonin reuptake inhibitor.

17. The kit of claim 16, wherein the selective serotonin reuptake inhibitor is vilazodone.

18. The kit of claim 11, wherein the antidepressant is selected from the group consisting of a selective serotonin reuptake inhibitor, a serotonin-norepinephrine reuptake inhibitor, a norepinephrine reuptake inhibitor, a tricyclic antidepressant, and a monoamine oxidase inhibitor.

19. The kit of claim 18, wherein the antidepressant is a selective serotonin reuptake inhibitor.

20. The kit of claim 19, wherein the selective serotonin reuptake inhibitor is vilazodone.

The application's sequence listing, which the Patent Office published only in electronic form, follows.

SEQUENCE LISTING (24 sequences)

SEQ ID NO: 1 - DNA, 47931 bp, Homo sapiens
  modified_base (1327)..(1327): n is g or a
  modified_base (1504)..(1504): n is g or c
  modified_base (1633)..(1633): n is t or a
  modified_base (1780)..(1780): n is c or t
  modified_base (3105)..(3105): n is g or a
  modified_base (3737)..(3737): n is c or g
  modified_base (4455)..(4455): n is c or t
  modified_base (4639)..(4639): n is c or t
  modified_base (5261)..(5261): n is c or t
  modified_base (5359)..(5359): n is c or t
  modified_base (5378)..(5378): n is c or t
  modified_base (5837)..(5837): n is g or a
  modified_base (6390)..(6390): n is c or t
  modified_base (6395)..(6395): n is g or t
  modified_base (7258)..(7258): n is c or t
  modified_base (7362)..(7362): n is c or t
  modified_base (7488)..(7488): n is g or c
  modified_base (11491)..(11491): n is a or g
  modified_base (11720)..(11720): n is t or c
  modified_base (11961)..(11961): n is t or c
  modified_base (13330)..(13618): region may or may not be present
  modified_base (13718)..(13718): n is g or c
  modified_base (13726)..(13726): n is a or c
  modified_base (16399)..(16399): n is g or a
  modified_base (16533)..(16533): n is c or g
  modified_base (18938)..(18938): n is c or t
  modified_base (19180)..(19180): n is c or t
  modified_base (19198)..(19198): n is c or t
  modified_base (19358)..(19358): n is c or t
  modified_base (19635)..(19635): n is g or a
  modified_base (22079)..(22079): n is c or t
  modified_base (25776)..(25776): n is t or c
  modified_base (31484)..(31484): n is c or t
  modified_base (32355)..(32355): n is t or c
  modified_base (32448)..(32448): n is a or t
  modified_base (36993)..(36993): n is t or c
  modified_base (45846)..(45846): n is t or c
aggcctcaggctcttctcctctctactcatctctcctcccttggcccctccttcagaggctgacagagccccactctcatctcttccccacccaagcctctttccacagaaagactgcttcctcccaggagacagcagctcatttgcacacagacacccacagccctcaaagcctggaaggccaagctgttaggacccctgagagcagggtggctcctgggaggagagcccaggccaccaccttgccctccctggcccctggccttcgatggggctgctctgatcacaaacgtccaccaacgtagccggcccagaagtgcacccatgtcctctggtatccactggctctccaagccaaactgggcagggaggagttgtgagggaaaactgcaggtcaggagggaggctggcaaagcgggccagggccaggcctgaccccagctctcctctcccggccccactgccggccagtgtttaacaaggccctgccttctccctctagtgctagggacagccaccttcttcctctccccaccgccccctctcccctgcaacacgtcatctgacaagtcagtgcgatctcactggaggtgcatctcacaggaacgcggggtcacagcctcctgcacacactccatgctgcacagcaaggtgcacgtgtccctcagagccccagacaccatcccccactcacccagaagcccaagtgattcccaacagcccccagcagcctaatgggttggggtcttgggagcagctgtccctggctccttccctgatcccaccgcccagcctcaccccacggttcctccattgccccacctcccactgcgccgccgggcctctgccagggtcaaggggcttcccccctctggcagcagacgccatggtgccgaggtggcctccacaaccgccctgtgcgccaataggacaagactgtcctccctcccccacacttgtcactttgagggacacgtggatgagacaggaaaacacaggggagtgtggagacctgaggtgacttggagcaagcctctcaacctgagcggcaatttcttcatctgtaaaatgagggggttgttctcatctctgaggctttgtgtcgctctcaaagcctgctagcctcgggttctaggactctgttgggatcgtgtgtgatgttttctgctgagcgactggcagcctgtgtcctcggggggaaagagggcaggcgctccaaagctcctgcgctctgtggctccccctccctcgcagccccaagccccaggtgtgccggccgccctgagcccctccagcacctcccggaggcgcctgcaagacacctaangtccccgcctccctcctctcccccccgccacacccctacccccggcaggcgacgtccccgcccctcgaccatggcctggtgaagaagccggccaggcccgatcagccccatccccgccgcacgagcggcgcctgcggacagctcctggggccccggccttgtcactccggaggcggnaggctccggggggtcgggctgggaagatcgagccggaggccgctaggctcccaggccccggccgaggctgcgcggccgcacggtgggcaggctcgggtgttccggcaaactgccgggtccccatcttcnaaagagaggaggccctttctccagcttcctctgcgggagcccgacccagccccatcccgccacccccgggctgcacctcggcccctccccggcccgcgcccctgcccggggcgggccaggaacctcggcccgcgccgctggggactntggagcggaggaggaagcgcggcggggcgggggcgggggtgtgtcgggttttataacccgcagggcggccgcggcgcaggagaaggggcagagccgagcaccgcgcaccgcgtcatgggggccgcctcgggccgccgggggccggggctgctgctgccgctgccgctgctgttgctgctgccgccgcagcccgccctggcgttggaccccgggctgcagcccggcaacttttctgctgacgaggccggggcgcagctcttcgcgcagagctacaactccagcgccgaacaggtgctgttccagagcgtggccgccagctgggcgcacgacaccaacatcaccgcggagaatgcaaggcgccaggtgggcgcccgggcccgggcgggggcggggcggggccgcggcggccaatcacagcacgcggccggcttgtggggcgggcaggctggcgcccccgacccgaaccccaccccgaccccggaccctcgccccgacagtcagccgcggggcccgagcgccgggctgcgcgcacggcctgcgctcccagcatgcacgagttggatggatgagggtggctgctcccaggccgcgcccgccttcgccgaaggtgctgggcttggctctggggcccccgcgctctcgggcagctgccttctcacctccggacgctgtcgctgtcaccgtcaccgcactgcactgtccatccaccctccactcgcccggcctcttttctggtcccaatttctgctccaccattcccatgaggcagattccctccagaaggaggaagcgcggcttccgcaaactaaggtctcccgcagggatctccccagggcccgggctctggaagcccttggccttcctcccctcccccagcaccgtggcttctcctttatggcctgcatctaagcagggtcctacaccctccctgccctcctggtgcccaataggaggaagcagccctgctcagccaggagtttgcggaggcctggggccagaaggccaaggagctgtatgaaccgatctggcagaacttcacggacccgcagctgcgcaggatcatcggagctgtgcgcaccctgggctctgccaacctgcccctggctaagcggcagcaggtgggctgagggctgaggcagagctcgggggcggcctcctagtgccccatcgtgggggtcgggggagagcagcccatcagggagggaggaaccctgggatccacatgggccctgacagaagggaaagcccaggtaagcacagaatggctttctgagcattgatttttcttggagatggggtggggagttactttctgttaaaggaancattctggagtaggaagccaaattcaaatacacttctccctaggctggtttatgagcttctttggaagagttgagaagggctgggcgtggtggctcaagcctgtaatcccagcactttgggaggctgaggtgggcgcatcgcttgagcccaggagttcaagaccagcctggccaacatggcaaaacctcgtctctacaaaaaaaaaatagctgggcttggtggtgcgtgcacctacagtcccagctactcttgaaactgagggggaaggatcacctgagcccaggaggtcaaggctacagtgagctgtgattgcactactgcaccccagcctgcgtgacagagtgagacctccccccaaaaaaaagagagagagaaaaggttgagaaagactgggaagtcaccaaagccagagaatgggagggatctgccctcactgcagggtggtgccaagctgggacttgaccctgaccctgactttcaggactcctgtcccccactccacaggctgcctccactggcaggggactcagaagtgatccggtcacactaagtgacacttagtgatcagaagtgccccggtgccactgagtggccttgtccaagctacatccactctgtgggctcctccttntagcagcgaggggagggcagatgtcccaggggctggtcactggagcattcctcccctctgactccccagtacaacgccctgctaagcaacatgagcaggatctactccaccgccaaggtctgcctccccaacaagactgccacctgctggtccctggacccaggtacggcccttgcagctcccctctcggcggtgccctagtgttcccacattgccctgctgcactccagaccatgcagttgtgtagggtctgtggagacagcaggtaaacccaaaggtgttgccctccaactggggctggacggtgcagatacccccacgccctgcttctcttggcaagtggacttccggaatctccagctgcagcccccacttctgtgtgtacctcggcctctcccatcacccctaggccttcctcctggctgcctggtttcccctttcgtgggtcctctcatgttccccaagagccctcaggccagggacccctcgtggcttccccttaaaccccgctccagccccctttatgagcagcttcgaggaaggcactccatccaataggccgctaagtgtctgtctgggttttggcctttgggtgtccccttggtgtcagccaccttaggtggtcatgtctctggggcaggggccctgcctgggtgtttctgtagctcccagccccctcccaccaggcctgtaggtggcccctgtctctgggggcacngtgatgttcaggaagctggtgggagcagtaaggactggtgcaggctctggtgaaggccgttgaagacttcaacgtggaggcctcctcaccgaccctgcctgcctgtgtctcagatctcaccaacatcctggcttcctcgcgaagctacgccatgctcctgtttgcctgggagggctggcacaangctgcgggcatcccgctgaaaccgctgtacgaggatttcactgccctcagcaatgaagcctacaagcaggacggtgagcaggcctctccctgtccaggaaccacgccaggtgtcctctctcagctgtctccccagagtcccagcccagagtcaggcagagcagctggtatgacaattccagcaggccctgagtttcccagaaagtggaggtgggaccggcctgcacccagtgtgcctggactttgctgctggcctgccccacgtggccatcctgctgtcactcctggccctgatgctcctctttgcctctgggaacctccaggatctgtttagctggctgtagctaattagaaattgtagagtggcaacccccaagccaattttccagctagctgcagatccacgggcctcgagccagtggaagagccgacttacagctgagaggctgaggtccgagcctttggcctgagctacatacctcacccccacgcccccaggcttcacagacacgggggcctactggcgctcctggtacaactcccccaccttcgaggacgatctggaacacctctaccaacagctagagcccctctacctgaacctccatgccttcgtccgccgngcactgcatcgccgatacggagacagatacatcaacctcaggggacccatccctgctcatctgctgggtaaggacctggcctcgcctccacatgagtnccacggaagtgtgggtccngaggtaggggtgggggatgtccagggtaagggaaggtgggttgtgaccctcacatctcacatgtgtggggcatcatactgtttgcttcacatgcaggagaccattcgtgttcccactttacaggtggggaccctgaggcttagggtcgtgagggacttagtggtcagagagctaggggccaaaccaaaggctctggccctgggtccagtgggggagccatcagcctagctcatgcccaaggaaacaagcactgtggccctgcctcaggattgagtggctggggcctggcacagccagaaatgacagtggcagcatcttgcagccccaggacatgtggccctcggaggagtgtgggtgggactgatgtgtgagatttctggccctaagccaggcctgcagcccttgagggccccagggtacaggtgccggccccagggtgccactcagcgatgcatgaanaagcaggcacagccaggcagggagccaagctgtccccttccttccttatctaggagacatgtgggcccagagctgggaaaacatctacgacatggtggtgcctttcccagacaagcccaacctcgatgtcaccagtactatgctgcagcaggtaagctctgggctcaagcctggggtggtgggggtcgggggtggggcgcaaaaaaagggagtcacagatgggcacaggggcgggaaggtttcgggtactgagcagcagcctggtgtgtctgtaggagcagtgagctggggtcggccccctcagtgaggtgccagctcctccctccaggctccacagtggcaggatgagagcaacaacgcactttcactcatctgctgtgggagtgagggccctgcctctgggaatggtggccacagagcagagaagctttcatgcacagggagttgacccgagatggggaccccagccctgtccccaggccagccagagtgggctccccctgacctggctccacacccctcctccagggctggaacgccacgcacatgttcngggtngcagaggagttcttcacctccctggagctctcccccatgcctcccgagttctgggaagggtcgatgctggagaagccggccgacgggcgggaagtggtgtgccacgcctcggcttgggacttctacaacaggaaagacttcaggttcagacatgggaagagcacgttctggggttccccggttctggggcccggggaaaggcaggcagcccaggcgcagggaagctggttcccaggcctgcctctaccctaccccagcactggttggaggctgggtctgttccagggctagggggtataggaggcctattagtccaccttctctggcagctttgacaaatagtcacttctataccttggaatggaggaagaaggcccaagtggtggtgagccagggcagggtaaagaatttgcttgtttctgccaggcacggtggtcacacctgtaatcccagcactttgggaggtcaaggcgggtggatcacctgaggccaggagttcgagaccagcctggccaacatggcgaaaccccgtctctactaaaaatacaaaaataaattagccaggggtgatggcgggcgcctgtaatcccagctactcaggaggctgaggcaggagaatctcttgaacccgggaggcggaggttgcagtgagctgagattgtgccactacaggccagcctgtgcaaaagagtgagacgctgtctcaaaaaaaaaaaagaaaaaaagaagttacttgtttctactgcggcttcatgccccagggcagctccctcctcattcctgtctttcaggtgccaatctgccctgtgccctggccctgccctgttctgtccatccgtcactctcaccctcgccctctctangccccaggatcaagcagtgcacacgggtcacgatggaccagctctccacagtgcaccatgagatgggccatatacagtactacctgcagtacaaggatctgccngtctccctgcgtcggggggccaaccccggcttccatgaggccattggggacgtgctggcgctctcggtctccactcctgaacatctgcacaaaatcggcctgctggaccgtgtcaccaatgacacnggtatgggagggctgagaggcccccacccagcctcacctaaaccccgctccaccccacagcaggacctcacttgccccactcagctctgcccttctttctgcctcccggccccaggtcaggcagggttcgggatcctcctagagcctcacggtgcacactgcgcccagctcagcacacctgggggtcctcttccaagcagggcccagggtctcgagggccagccataccttctctgcatctccctggcctcactttctgctgccccgccagcccacactcttaggggaccctcttctccctctgacctcttccctctcctttcatctcatctcccaacagaaagtgacatcaattacttgctaaaaatggcactggaaaaaattgccttcctgccctttggctacttggtggaccagtggcgctggggggtctttagtgggcgtacccccccttcccgctacaacttcgactggtggtatcttcggtgagaggagggatagaaaagccttcgccccagctagccctccccagcctcctggacagccaggcgcctcctgccccagccagttctagcctctcctctctaatgatgtcccccgctgtgacccaccgccttctcctttcctgcctgaaactccctcttccaggaagtcttccccagttcctcaggatggggaagggttgccgggtggaaatgccttttctacaaaagttaaatccatctgtttgcaacctctaggccctaagacaatttaaccatccttttccagaaccaagtatcaggggatctgtcctcctgttacccgaaacgaaacccactttgatgctggagctaagtttcatgttccaaatgtgacaccatacatcaggtattagcgcccccaccccacccacccccagtactgtcacaccctcaatccacttctcctcctgtgatcctagctgcctcatccccagggcttgtccccatgctcctccagacctcaaaggcctggagttagagtggcccactctcctgagcctgtcttgggtctcccttctcccccaagatagcttctggtccagcctctgccctgcaggaagctggatggtgcctgggtaaggaacccctgttcctggccccccatgatcttccctgactcccaccctgtgcctgcaggtactttgtgagttttgtcctgcagttccagttccatgaagccctgtgcaaggaggcaggctatgagggcccactgcaccagtgtgacatctaccggtccaccaaggcaggggccaagctccggtgtgtggtgggaagccgggggaagtgggaggcagagaggagcggctggcaaagggtgtggcaggaggtgtctggctgctctgatggggtggggggcaccaaccacagagctggactgatgtggatgcctgtctcctcgctatgtcatcaaatatttattgagtgggccttctggctggcatggggcgacacaaatgccccctgccaccatcagagagatcccaggccccagggtcttattgccacagtttctgcagtccattggggggcggaagtggccaggggcatgtgggccggggtccaggagcagactccagcctgagtcccctgtgcccatggtacccactctgcccaccaggaaggtgctgcaggctggctcctccaggccctggcaggaggtgctgaaggacatggtcggcttagatgccctggatgcccagccgctgctcaagtacttccagccagtcacccagtggctgcaggagcagaaccagcagaacggcgaggtcctgggctggcccgagtaccagtggcacccgccgttgcctgacaactacccggagggcataggtaaagccctgagtgaggatggtgtggggctaaggtgggtcctcaactctgggcttggcccaggccccaggttcctggtcagctcctaccagctgagccctggtaccctgtcctggagggccaggcagccccccaagctcatcagcagggcctgcgagtggggacaggcatgtctttcccccagcatcctagagagggtgtgctcagacctgagggcccctccccttccagaggaagccagacacaaggctctgtgaggtcacactgcgggctccgctcttattggccaggggacggtagctgcaggactctgctctcctgcggccatgggccagggttgggctactgcaggacttcccagcctcctcttcctgctgctctgctacgggcaccctctgctggtccccagccaggaggcatcccaacaggtgacagtcacccatgggacaagcagccaggcaacaaccagcagccagacaaccacccaccaggcgacggcccaccagacatcagcccagagcccaagtgggaccatgcaggggaggggcagggtgccaggggtgggagaggcggggccgggtagggacagggcagggtacaagggagtgcgagagggataatggcttctggtgagaccacaaacctggagaggggaggcagaggtttgtctgtttccctgcactctgtcccacagacctggtgactgatgaggctgaggccagcaagtttgtggaggaatatgaccggacatcccaggtggtgtggaacgagtatgccgaggccaactggaactacaacaccaacatcaccacagagaccagcaagattctggtgggagccacctccccacccccaaacctgagcatgtgcatacacacagagatgctgtcccgctcaccacacagtggggctgccaccacattttaaattgaatatttaaaacaatactcaatttcgggccgggcgcggtggctcacgcctgtaatcccagcactttgggagggggaggcgggcggatcacgaggtcagatcaagaccatcctggctaacacggtgaaaccccatctctagtaaaaatacaaaaattagccgggtgtggtggcgagcacctgtagtcccagtactcaggaggctgaggcaggagaatggcatgaacccgggaggcagagcttgcagtgagccgagatggcaccactgcactccagcctgggcgacagagcgagactccatcaaaaaaaaaaaaaaaaaaaactcaatttcagattttgatgaacatttactcaatgcctgagcaattcttctttccttaaaaatcagtctctgggaggcctaggtgggaggatcacttgaagccaggagttggagactagcctgggcaacatagcaagatcccatctctattcaaacaaacaaataaacaaaaatcaatctctagtaacagaataatttgtacataaataagtggtgctcaagtcgttttttaaaagattgaaagcctctgtttgtctcctctacaaaaggggctacacttcctctttaccctcattccctgcctatttggctgagcacaaattatgccactgagccacacactgttactgttccttggcactttgatctgttgcctcatctttttctcaacagccttgcaaaattggtgagcttattcccattttacagatgggatttgatattaactctgaggttcagaaaggccacagagctaataccaagctggctccttcctaagggcctttacgacacttgggggtcttctcttctctgcccctgcctggatatgtgttgcttgaccgcaggcatccagggagggtgagtactgcatccaggacgttatcagcgtccagcttgcagagagtcttataggcaaaggttgcaacttaattccactgccccctcaccaccacctccagccctcagctcccacttggggcctcccgctcagaggctgctctggagctcctgggccctgtgacaccatccccctgtgccctcagctgcagaagaacatgcaaatagccaaccacaccctgaagtacggcacccaggccaggaagtttgatgtgaaccagttgcagaacaccactatcaagcggatcataaagaaggttcaggacctagaacgggcagcnctgcctgcccaggagctggaggaggtgtgtggctcgcaaggtacagggagaggggaatcctggggcagtgagcccaacacagggtctggcctggccttcacgctgcttcctcttcctcgttgtatcaagtcatggcatctgccatgcgatgtgcacctcagaactgctgagagggcagcgctccccagctccctggctccccacctgccagcccatggggcctgggggnagtgcaggccccagagagaccaagtgcaaaggagtacagctcattgcctctccttcctcctgcagtacaacaagatcctgttggatatggaaaccacctacagcgtggccactgtgtgccacccgaatggcagctgcctgcagctcgagccaggtgagagctcatgtgcaggctgagtgagaggcgagggctgggactggcatggggcccgggggtgctgggtgagagcacagagttgggntcccctcgctcttggggtcagcgtgcccaggaaatgccctttcttgttttccacgaggggggcttctctgccccactgagagccggcacctacttcataccatgccccgatcagctgcccctccctcagaaccgccctctgcttaagggtgtccactctctcctgtcctctctgcatgccgcccctcagagcagcgggatctcaaagttatatttcatgggcttggactccaaatggggggaactcggggacactagctccccccggcctcctttcgtgaccctgcccttgacttcctcaccttctctgtctttcctgagcccctctcccagcatgtgactgataaggaaattgagtcacacagcccctgaaagcgccagactagaacctgagcctctgattcctctcacttccctcacctaccctgccacttcctactggatagaagtagacagctcttgactgtcctcttttctccccactggctggtccttcttaccccggcccgtttgaaagagctcacccccgacacaaggacccgcacacagatacctcccagctccctctcaacccaccctttccagggttggagaacttgaggcataaacttgcttccatgaggaatctccacccagaaatgggtctttctggcccccagcccagctcccacattagaacaatgacaaatagaaggggaaatggaaaataaacaggagaaacggttttcccaggacagggtttggcctacaagttgtggatgtgggtacccatgccaagtgtgaggggaggctggccgggtgtggtggctcatgcctctaatcccagcactttgggaggccaaggtgagtagatcacttgaggccgggagtttgagaccagcctggccaacatggtgaaaccccatctgtactaaaaatacaaaagttagctgggcgtggtggtagatgcctgtagtcccagctacttgggaggctgaggcatgagaatcgcttgagcccagcctgggcaatacagcaagaccccgtctctacaaataaaatacaaaaaattagttggatgtggtggtgcatgcctgtagtcctagctgctagggaggctgagatggaaggattgcttgagcctgggaggtcaaggctgcagtgagccgagatggcgccactgcactccagcctgggcaacagagtgagaccctgtctcagaaaaaaaaaaaaaaaaaaaaaggagaggagagagactcaagcacgcccctcacaggactgctgaggccctgcaggtgtctgcagcatgtggccccaggccggggactctgtaagccactgctggagagccactcccatcctttctcccatttctctagacctgctgcctatacagtcactttttttttttttttgagacggagtctcgctctgtcgcccaggctggagtgcagtggcgggatctcggctcactgcaagctccgcctcccgggttcacgccattctcctgcctcagcctcccaagtagctgggaccacaggcgcccgccactacgcccggctaattttttgtatttttagtagagacggggtttcaccgttttagccgggatggtctcgatctcctgacctcgtgatccgcccgcctcggcctcccaaagtgctgggattacaggcgtgatacagtcacttttatgtggtttcgccaattttattccagctctgaaattctctgagctccccttacaagcagaggtgagctaagggctggagctcaagncattcaancccctaccagatctgacgaatgtgatggccacgtcccggaaatatgaagacctgttatgggcatgggagggctggcgagacaaggcggggagagccatcctccagttttacccgaaatacgtggaactcatcaaccaggctgcccggctcaatggtgagtccctgctgccaacatcactggcacttgggtcccttcattttcctcaaagaggtgctgtgaaaccccaagcctaggaaaaggtagatccctggaggaggcaggtaatgtggtgttgggagagcctggctgtgtcccctctgtaggctatgtagatgcaggggactcgtggaggtctatgtacgagacaccatccctggagcaagacctggagcggctcttccaggagctgcagccactctacctcaacctgcatgcctacgtgcgccgggccctgcaccgtcactacggggcccagcacatcaacctggaggggcccattcctgctcacctgctgggtaagggcacatgtcgggccttgaggagggtaaagacggaccacagtgtgagtgagggttgggacagggctgactagagggtagggagcaggctggggactgagagactccagccctgtgggggatggttgcccaggctggaggggggtgggcgctgggagtggggagccccccacttgcatctggtgccacattcactgcagatctatgtcgggcaagtcaccatggatgggggaagaagttaataatcttgtccaggagaccacggcacccatcacaacattgtgtgatcttagagggcgaggaagaggctgtgagtgggagctggggaggctttgccaagaggtggcctgtgagcagggcctcggaagatgacagggtttgacagatgggaagtgggggatgagaggacagacgcagtgttcaggccaagggaactggaacaaagaagaacctgagaatgtaaatctacttcaaccctggaccctcctttgccaagggctgcaatctcagatgccctgaatgtgtgaagtaggcggtgaggacagtaagggatggtagggagtaaggcaaagcagaggctactggttctctgtccctgatgggctgttaggaacactttcctggagcagagagaccagacaggccctcagaccatttagaaactataagggaggccccagaggacggcctggctgtgggtctagctcccacacaggctgggagtccagccctcttcagcccctctctggtgagaccaaagaacatctggtgatgtcacagtggacgtcagttcaccaactgggagacacaggccccgggaagaaaagcaacatgcccagcgtggcctgggagctggggcagagctggccttagaactcagcccctgacaattggtaaaaggggaaaggggagcaacctaacactgatgcgctctctgtctctctctctggctctctccctggctctctccctcttctctctcatgttctctccatcactcatcgctctaaccctctctcactggtttgcactttagacttcatctgatgtcagccgaagcttcacctcacttggctaggaaagagccttgagtccaaatctgtttctgagccttccattcatcctgagtttcttccttttcctctgtcgtggagaactaggctcttttcttacactaaactcagaggcatcagcctctcctgaaggagacggctggttcctgtcagagttgctgagctgcagacaccgacctcaggtggtgcggaggggacatggcagagtggctggtgaagagagcagcctgccagcctttcaatcccagccctgccacttaggagccgtgggcccccggcgaggggggcggtcacttaactctccagcctgtttcctttactagccaatgggaatcgtgacagtacctgggtgcagacaggattgaaagtgaattcacacaatgttcttggtgcagagccaataagaggtggccaccggggtgtaggtgttctggggacctgtaatgtcctcacatgtcagcagttgctagtcacattggtctccactgctcacggacagtgaagaccacctggattccctgataaccagcaaggcccccacctagagccaggcagtaatgacctactgggctggatatgcacaccaaagatgatgtgtgcctcaaagcttgcaaacagtaggtgctcaagaaatgccactatgattagcaggactgggatctggagcgctcttcctgcaggagggcattgagcctaagtaacatttgtctttcctctctctgccgtcccccacactcgcctccagggaacatgtgggcgcagacctggtccaacatctatgacttggtggtgcccttcccttcagccccctcgatggacaccacagaggctatgctaaagcaggtccgcaccagcccaggggcagggaggccccgccgggatgggagggaccctctgattcaggagttccctccagtttagccctcccccgggatccccacggcagcacgcagtctgtccccggaacccccagtttgggcagaactccctctgcttgcagggctggacgcccaggaggatgtttaaggaggctgatgatttcttcacctccctggggctgctgcccgtgcctcctgagttctggaacaagtcgatgctgganaagccaaccgacgggcgggaggtggtctgccacgcctcggcctgggacttctacaacggcaaggacttccggtacatccagctagggctcaggtctcgttcctgagccccacgggcaagggaaatgaaccaagnaaagggtccactactgtcccccagctggagccagcagggcaggatggggacagggccagagtttgggactgagtgtctagagaggtgttggcttctggcaggaaaaccccatccgcctgatggggacttctgaagcacgcaacagctctgtcagcctggccgctgggaagtgctcaaggtcccagtcctgggtttgagcatggtaggctgccccgcgtccctccttgggagcagcccctgcatggagctggcctctccctgggggcacatgctgtgacacagggaggcacacgaggatgttgggtgctctgtacagatccactctcacccctgacaggctcagaagctgccttccttggaggatggcgttttagttacctattgctgtgcaaccaagcaccccagagcttagccttacgaaacaaccagttgattttgcttatgattttatgtgccaggaattcaggcagtacacagtggaaatggcctttctctacagggccccctctgttgggggcagctctcacagccgggatggctcaatgggggccatacgtccagagccccagttctggctgtcggttgaggtcctcggtttttcccatgtggcagatgctggggcacatgttcccagtggcctcttggctcacatgttgggtgcttggggtgagatggctggaacggctggaggtgggtcaggcatctctccaggctagctcgggcgccctcccagcgtggaatctgaggtgggcagatttacctggcagccagcatcccccacagcaactactgacgcagccagttctcaaggctaggtccaaaactggcccagagtcacttctgccatgttttattggctagaacaagtcacaagttcacccagattcaagagaagagaaaaaagtccctcccacttgggagaagtggcaaagaccatctgtcacagctgaagaagtgtctcttacaaggagaacagacacggggagcctgaaacaaaacccgatgggattccctgggctgtgcaggcccttccaggcatgaggactcagccacagggctgagaggagacaggatctgggggatgagagcccttgtggggtcttcccttttatggggagtcagaggagaagctggatagatccccagccttgtggccaggatgctgggcagctcttccttccccctccccgatgagaatgacagaaaaacaggattcacctgagccaaaaggcttccagttagatccaagagagaatttcccgcagtttgaattggtttgctaaacaacaaggaagggctgggtgcggtggctcacacctgtaatctcagcactttgggaagccgaggcaggaggtctgcttgagctcaggggttcgagaccatcctgggcaacatagcgagaccccatttcataaaaaataaataagtaaatgagaacaaggaaggactgacgagagacggtagaaccttctggtttgggcagctctgcagctgccattcatcctggccataagaattcttggggtgaataagtttgtcgctgttgggccgcatgagatgcagaatcgcccactctcacccctgacagaaacagttgtttccttcagggagcctccatcttgggagataaagcatgtgtacatgggaacccactggccacacattctctagaaagtacacaatgtcccagtgcctctagagcaagcactttgtacagtcagaaagcaacaggtggtgggggctggagtcattcaggaaaatgggaggcagaggaatggcctgaacggcccgatgctaggggcttctgcccccagattccctcttacgcacactcagtggttgcccttcccctccctccccacagtgctgtgtcccctgcatgctgcagtgctggggtctgccctgggtatagcaaggcccactgttcccttatgcccagggcttctcactgtcctctcccaacaccctctcccccactccactattcctaggatcaagcagtgcaccaccgtgaacttggaggacctggtggtggcccaccacgaaatgggccacatccagtatttcatgcagtacaaagacttacctgtggccttgagggagggtgccaaccccggcttccatgaggccattggggacgtgctagccctctcagtgtctacgcccaagcacctgcacagtctcaacctgctgagcagtgagggtggcagcgacggtgagagagaagcgggaggccctggtgggctgaggaccaagaaagggtggtgagcttgggaggtgggaaaggggcacttagtggcccatgggcagaggtgtggggcagagcaatcggaaggaagggagccacccagaccatcccaggaggcaggtcacagggcccaaaaggtacagcacccccacccctncaccatcacaggcacaccagggccaagccgctaggaccctgggtctgacagctgggctcccttcccttgcagagcatgacatcaactttctgatgaagatggcccttgacaagatcgcctttatccccttcagctacctcgtcgatcagtggcgctggagggtatttgatggaagcatcaccaaggagaactataaccaggagtggtggagcctcaggttctggaacactcccacgggatgngggctgggggatctctgngagtgtctgcatgtgcctgggtgtctggatgggccagggtaggggagtgtgtgtgtgtgtgtacactattgtgtctgtgcatatgatgtgtgtggtgtaagtgatggggaaaacggggtgattgtgcacagaggcccagcacgcaggagaatggggtgcncagtatagccccaagtgcagggaccctccctcaagtcaaaaatgccacccccagcctggttctccccaaactcatcttccaacatatattcccactcgacaggctgaagtaccagggcctctgccccccagtgcccaggactcaaggtgactttgacccaggggccaagttccacattccttctagcgtgccttacatcaggtaacgggaaaggcaggagggcacattgtgaggggcagtacccacagctttgtgtttcaactgcggccactgcccngtccacaagctctgtcagtcagggcagacccgggggagccggccgcacggtgcaggtgcctgggcccactcacactgccaaggctgatgggttttttcttgaacattcttttgatgagagtctgtaccatccaaacagttgaacacagaaactcaacctaataattggctaatggttaccagaccttggttaagtagttaacattaaccacgactcatggctggatcatgagctctgcactgttttgttttgcttttaaaacaagactgtgattcttttactattattgaacattgtctgcgatacaatttgaattgtacctggaagcccttctagacactaaaatgtaggattggagatcggttaaggtgggaggcagggttgctggggcaagttacagtcacaggctggggtcagacagaactgggttcaaactccgtctccattactttgtttccttgagaaaattcctcaatttctgtgagcttccatttcctgacctgtgaaccccatttcacaggatgcacgatggctaacttcttagcattctgtctcatacacagcctcctcagggaggggtggccaggaccccactattcatcactctctagtggaatgtagctgcacactaggtctgcaggtcacatggccacagatgagtgtgcccaatgcagcccctctccttctgtgtgccccgggagagcacttgctgagggctagcaaggctgtttgtgatccgggaggctccctgggaggctgggggctagagagacctcaggctggagttccaggtgcccccgggctacaggtagcccaggccacccccagagggctgtggctgcctctggccctggcctcccgtggttcctggaagcccagcaagggcagggcccatgcccaccttgcctcctggcacctgggatgatgccagcacatcatcaagtgctaataactgattgtgggatggatgaagtctgtccccagagtccaggaagagggcatccctggagcacctcagataggcctgacctagacggtgctccagagatgacacttaggacagggctcccgcctgcctgctggagtggtccctggggttcccagccggcgctggctctcacccgggagccagctggtgtgatggctagcttcccagcttaatgcagacaattctccaaacaggggtgggcaaaggagacttggctgctctagaaaaacattccggattctggccagcagccttcacaaagcacttttaggaaagaccagggaactaggtggtacatgcttgcacccagcattcaaagtgagaggcctgtgccactggctcaggacatttaaaacctcttcagactttaagctggggagaatcctccagccttgactggcagatttctaccagggaattcgtgatgctttggataagatcatgtaggactggcttccctgcccagaccaccctagtagatccacacggcccatttggccacaccttgcctctacttgcatataccccagggatggagacctcactgcctccaaagccacctgccagatctctgaaggctctgccctgaccccatggagcaggccctcctgagttgtggaggcagctctgtgggtgggaggcatctacacaggcacggctaggaagaggctcagacaatgctaagagctggggtgggggagctcaccctgatagctgtgggcagagttggggggccttggctctgctgtgcgcatgtgacttagcacacatcacatgtgatgtgcagaagggcctggggcccagtggcacaaggccctcaaccaactccgccccgggccacggcctcgctctgctccaggtactttgtcagcttcatcatccagttccagttccacgaggcactgtgccaggcagctggccacacgggccccctgcacaagtgtgacatctaccagtccaaggaggccgggcagcgcctggcgtgagtgtcctccagccctcctttgtttccatgctctggcctgcgcccctgggccttgaggggtctgtccactggagcttttgtgggaacacttgccattttgagccgggaactcccacctgcagcgtgggccaggcctgattgccatctccttaggcacctggagccctggggccctgggacaagtttcagctgggagtgggtatggagagtggatgtcaggtgggggcaagaggggccatgtccttctgactctgcctccctgtctcatgcctccccaggaccgccatgaagctgggcttcagtaggccgtggccggaagccatgcagctgatcacgggccagcccaacatgagcgcctcggccatgttgagctacttcaagccgctgctggactggctccgcacggagaacgagctgcatggggagaagctgggctggccgcagtacaactggacgccgaactccggtacngccacccaccccacctccagccttgggtcttaaccccctccccaggctgggcagccatgcggctgacctcggagcctggccctgccccgcacccttgccctgccctgccctgccctgcccatgctgtctccttgcttcccgctcagctcgctcagaagggcccctcccagacagcggccgcgtcagcttcctgggcctggacctggatgcgcagcaggcccgcgtgggccagtggctgctgctcttcctgggcatcgccctgctggtagccaccctgggcctcagccagcggctcttcagcatccgccaccgcagcctccaccggcactcccacgggccccagttcggctccgaggtggagctgagacactcctgaggtgacccggctgggtcggccctgcccaagggcctcccaccagagactgggatgggaacactggtgggcagctgaggacacaccccacaccccagcccaccctgctcctcctgccctgtccctgtccccctcccctcccagtcctccagaccaccagccgccccagccccttctcccagcacacggctgcctgacactgagccccacctctccaagtctctctgtgaatacaattaaaggtcctgccctccccatctgagtctgtgtccctcacagggaagccagggacagggacaggctgctttcctgcctcctggcagtcaagtgggtcccgttactaggtttgttcctccatcctccttcaggagccggggaggatccccagagctctgccccagcacctcctggcgctggcgcctgtcttccctccagcccaggcagcccgccactgtcctgccaccgcaggcagcccctgtctggcccaagcactgacccacgcggactctgggaagcagacatcctgggctgctggcctcacatttccactggcagtggagcctttccctgctccacaaatggccaggtccccccaggggaaggcttccggctgttatcggctgcctcagggggcgagtaccttggagggcctgcttcaaggagggtgccccctggagggcacacaccagcctagtgcttaccttggctcctgcctgtaccagctccatgactctgctcgggtgaacagccttggctctcagacagccattctaacactgccagtgcagaggggcctcagacgctggagtgtagcagtggctgcacctgcacagggattagctgccagcagccaccctgctggcgtcccagcacacacctcctcactccctgcattggagggagtgtcattttaagggacatttttatgacttttatgtgtatgtttatgtagaaatttggaaaatacagaaaactgtaaagaaaataaaagccctttatatcaacgtcaagagataagccctgttgacgttttggtgtacaacttgccggacttcttctcagcacatgtgtattttaaatgggatcacaccatatttacagtcatacatccttttatcacttcatacaactagatctgtttttctgatatttaaatgccagacttcgaacttggccaatagaagttggtccatttgctggggccaggggctccccagccacccgggcccctctgtcaaaccctcagccctgagtctcttctgggctttgctgatgtcttcaccctagctaggtccatctcccaatatctgtcccccttagtccacagcttttgccccccaatccaggtgccgtgcgtgtctctgtgtgtccgtgtctgtgtgtgtgttgtacacaggcttggctgttacaggcccattctgtaaggcaggatgtggggctgaggtattttaggattgaaagagggtggaagtttatgattacataggacaatggaatttataaacatgtcctctaaatggttccgagtcatctaccaatgaagacttcttgaattatccccccttttcccagcctgttttgaaagctctttgtttaccagacaaaggtcatcatcatatgaccccctttgccttttttttttttttaagatggagtctcgctcttgttgcccaggctagagtgcagtggtgtgatctcggctcactgtaacctccacctcctggctttcaagcgattctcctgcctcagccttccgagtagctgggattacaggcgcccaccaccatgcctggctaaatttttgtatttttagtagagatggggtttaatcatgttggccaggctggtctcgaattcctgacctcaggtgatccacccacctcggcctcccaaagtgctggaattacaggcatgagccaccatgcctggcccccgtttcctatttttatgaaccacagcggttcatgctgcctgtcagagcttctgggccgcgtgaggtcaccagctttcaacacgcaaaggactgcactgcagctgggggaagagaaactccacactgcattggcctggccagccttaccctctgggcttttgaaatagtatcttttttctgtttgttttcaaacagagtctcgctctgtcgcccaggctggagtgctggagtgcagtggcctgatctcggctcactgcaacctccacctcccaagttcaagcgattctcctgcctcagcctcccgagtagttgggctactacttcaggcgcacgccgccatgcccagctaatttcttttgtattttagtagagatggggtttcaccatgttgcccaggctggtcttgaactcctgagctcaggcaatccgcccgcctcagcctctcaaagtgctaggattacaggcatgagccaccgcgcccggcccaatagtatcattctttagatgcctgcctctgcctccttgggtgagtggggagaggcaggggatacctggaaggtagcagaggaagaggaggcggtaacagcaggaagaggggccaccccagtgttttctactggtggccctgaaggctgagcccatccccgtgccatgcctgccaatgccgctcttgggagaccagctctcacctacgctagccacaggtggtggctgccagacagtttctctgatccccacagccctccccaccctctaccttcctctgtctgcctaacccccttcccacccaccctggcttttaacataagtgaaaaagtggctaaccccacctctgcacttatcacctgtgtgaccttgggcagtttgtttttgcagtctgcattttcttttcttttctttttttttttttttttttgagatggagtctcgctctgtcacccaggctggagtgcagtggcgtgatctcggctcaccgcaagcttggcctcctgggttcacgccattctcctgcctcagcctcccgagtagctgggactacaggcgccagccaccacgcccggttaattttttgtatttttagtagagacagggtttcaccgtgttagccaggatggtctcaatctcctgacctcgtgatttgcctgcctcggcctcccagagtgctgggattacaggcgtgagccaccgcgcccagcctgcattttctttcttacggttcttatcaaccctctcagcgttgccatgaagatgaaatgagatgatgtacaaagtcctagtagagtgtcttctctttataatgaatgcatcgtctcctgagaaagctagtttcataacaaccccagatcagccaagtccagatcagccctctcacttgagacaggaagaggacncggggcaactgggtgccggagctggactgaaaactcccatctcccagctgccttccaggaacttccccaccacacgtccttgcacagccagtcaactgtcttcttactgggagcacacagagctcgtccactgggggcccacagcttgcctcagttccgggagtactcagccatctccctgtgtcgcctctccctcatcatccctccccatgtcacatctccctcagcctctccgtgttacctctccctcatcctccctccccatgttgcctctccctcatcctctctctcatcctccctgcccgtgtcgcctcttcctcatcctctccctcatcctctccctcttcctctctccccatctctcctctccctcatcctccctccccatgtcacttctccctcatcgtctccctcatcctccctccctgtgtcgcttccgcctcatctcccctccccatgtcacctctgccttatcctctctctcatcctctctccccatctctcctctctctcatcctccctccccatgtcgcctcttcctcatcctctctccctatgtcacctctccctcatcctctccctcatcctctctccctatgtcatctctccctcatcctctctccctgtgtcacctctccctcatcctctccctcatcctctctccctatgtcacctctccctcatcctctctccctatgtcacctctccctcatcctctccctcatcctctctccctatgtcatctctccctcatcctctctccctgtgtcacctctccctcatcctctccctcatcctctctccctatgtcacctctccctcatcctctctcccaatgtcatctctccctcatgctccctccccgtgttgcctcttcttcatcctctccctcatcctctccctcatcctccctccctgtgtcgcttctgcctcatcctctctccccatgtctcctctccctcatcatctcccctcaccttcgaggatccccataagaccctgcctggggatttctatcttgccctctgtctcctaactcttgctcatagtgctcaccccatttcctgtcctgtgtgcctggcgattccccacctgtgtcctccaggcccggtgcttctgatttttagcctactgtttaatctggctgtcgagagttttgtcgttccaatttaatccctatatttttcattttagcatccctgcttctttcaaacctcctgggttttcataaacgcctgtttttgcctcacagattctgttctctgaatcactttaaagacctggtttttttaattgtggcaaaatatacataatgtaaactcaccatcttaaccatttttaagtgtacaattcagtggcactaagtacattcacattgttaattgttgtgcagccatcaccactgtccatctccagaacagtttcatttttctgtgtgtgacaaggtgcccccaaaaagtgtgcttactctgttgtccaggctcactgcagcttcaaccttctgggctcaagcaatcctcccacctcaagctccacagtagctgggagcacaggcatgaaccaccacactcagataattttttttaagtttttagtagaggccaaagcacggtggctcacgcctgtaatcccagtacttgggaggccaaggcgatcggatcacttgaggtcaggagtttgagaccagcctggccaacaatggcaaaacctcatctctgctaaaaatataaaaattagccaggtgtggtgggggtcgcctgtaatcccagctatttgggaggctgaggcaggagaagcacttgcacccgggaggcagaggttgcagtgagccaggatcatcccattgtactccagcctaggcgacagagcaagactctgtctcaaaaaagaaaaaaaaaaatttttttttggtagagatgggatctccttatgttgtccaggctggtctcgaacttctgggctaaagtgatccacctgcctcggcctcccaaagtgctgggattacaggtgtgagccacagtacccagcctctgtacccattaaacagtaaaatcatacagtatttgttttgtctctggcttgtctcagcataatgttttcagtgtttatccatgttataggatgtgtcagaatttccttccctcttaaggctgagtaatattacattacatgtatataccacattttgtttatccattcattcatccatgaacatatgggtttccaccttttggttatggtgaataatgttactatgaactgtaaaaaaaagtaattcaaaatcaaagctgttgaaactttaaattattctgagccttgaaggaaagtaattttgggacctgagtcacttacgggcagctatgaactttgtttccttgattatagattactccttttccccttagctacatcattttgtaaaatgttataaaagactgaagggtgccatagaagttccctttcctcttttctgttgaacttcattatagatgattaacttccctcttccttctcctacgcaaagacctcacgactgtcacattgtccaagatgtgttaaatgtactcttttaaactgaaaaaaagaaaataagctattactaatcaaattgctgtacctcataaaccaaacttatatgggaaatgttgtgattctacctaatttcttagttttctgactataaagtaagaccttaaacttttcagcttcagagcactgaccccatttctttggagcctgtgagaatggccgtcctcagcttcacgctcgaataaacctgttaaactggattctgatcttttttattatttcaggttgacagaacactgtgtgcaaatatctgtttgagtcccagctttcagttcttttgtgtatatacccaggaggattgcccgatcatatggtaattctatgcttcattttttttgaggacccaccagactgttttccgcagcggctctgccattttcccccagcaatgcacaaggtttccaatttctccacacgttgaccgactcttgttttctgtttttttgataacagccatcctaatgggtgtgaagtggtggctttgatttgcctttccctaataattagtgatattgagcatattttcctgtgctgatgagcagctcatgtattttctttagagagatgtctacccgagtcctttgcccatctttgtttttgttgtcgttgtttgtttgtgtttgtttgtttgttttgaggtggagtctcactctgtcacccaggctggagtgcggcgaggcaatctcggctcactgcaacttctgcctcctgggttcaagcaattctcctgtctcagcctcctgagtagctgggactgcaggcgcccaccaccatgcccgactaatttttgtatttttttagtagagacggggtttcaccgtattggtcaggctggtcttgaactcctgacctcaggtgatccacccacctcagcctcccaaagtgctgggattataggtgtgagccaccacgcctggccctttgcccatctctgaatgtttgagtttgaggagttctttatgcgttctgggtattaattccttagcagatctgagagtaacagatattttctcccattccatggattgcctttttgctctgttacagtgttttttgatatgcaaaagtttaaaattttgatgaggttcaatttgcttattttttcttttgttgcctgtgcttttgatgtcatatccaagcaatcattgccaaatccaatgtcatgaaacttccctctgtgttctaagaattttgtagactttgctcttttgttccctctttcttctcctacacaaagatctcatgactgtcacattgtccaagataaggtgttaaatgtactattttattatttttattttatttatttattttttgagacagagtttcattctgtcacccaggctggagtgtagtggtgtgatcttggctcactgcaacctctgcctcccaggttgaagcgattctccagcctcagcctcccgagtagctgggattagaggcatgtgccaccatgcctggctaatttttgtatttttagtagagacaggatttcaccatgttggtcaggctggtcttgaactcctgacctcaagtgatccacctgcctcagcctcccaaagtgctgggattacagacatgagccattgtgcccagccttaaatgtactcttttaaattgaaaaaagaaaataagctgtgatccatttttgagttaatttttatacatggcataaagacctgcattttaagtcccttttggattgctctgctacttgtccttcctccattgcagtctgcttcattcattgtgtctgcagtttagcacaagctctggaaccaaccatatgaatttgagtcccacttccaccatccgctggctgtgtgactatgagcaaattcctcaaccgttctgtacctctctttcctcatctgtaaaatgggagcgttgatcacagtacttacctcatgggtttcttgtgaggattcatatgttgaaagcccccagatggtccctggcacctggaaccaacccacagtgagggttggtaattattattgtccctcctaaaactggattttctcttatacttggtaaactgtacctatcagccatcttcagttgggttggaatggcctgcacaatcccatgcatgcacctgacgcttgcaggggctcccagcttggcagagacgccatttccatcgggatcagctatccccccacaccaatgctgcagctctctggatggatgcaccctgacctcccctgtgttagaggagaggtgggcgtgttgaatcatggaggcagacttcccctttgccgttctcgtgatagtgactgagttctcaggatctggttgtttaaaagtgtgtagcgcctcccccttctctctctctcctgccaccatgtgaagatgtgcctgcttccctttcgccttccaccatgattgtaagtttcctgaggcttccccagccgtgcttcctgtacagcctgtggaactgtagagccaactaaacctcttttctttataaattacccagtctcaggtagttctctatagcaatgtgagaatggactgtctacatgcttgaagcaggaagggagactttcctgtgagctcagtcgatcagcttaaccagaagtgtcactatttttttctttctttcctcatgttataaatatattttacccataatggatcatattggggggttatttggtcagtttctctagtcgtggtatcagcccatgtgtagaggtagggcctttttgaagatgtgagccattgtgggctgagagtgatggaaggcaacccagggtacagggattctgagtgtggagggaagtgagtctgaggagaaatccaaggtgagacagatggagctggcctccacagacctcagtgcaagagtactgggggtgaccacaggcctacagagagctggtgtcttgccagctggttttcagatcaggctcaggtactcatgggcatgcaccctggatggagggtgcccgcctcacctctccacaccccacccagtccctaccttgtgtgccctctcctaattgcaaactcataacatcagggtctccctggagaaacaggtatgatggggagggccctgcacagccctggggttgattgcacagcccataagagagaaaaagcccaaacangtgaacataagaggtcaagttagaagaacctagagagataacctggcttccagagacccagatatatcacatccatccatccatccatccatccatccatccatccatcatcccatccacctgctcagaagtggtcccagcctatggagggagggcctcatcaatccctggccataacccaagggtggctcaagccccagggaaaagtggccgaggagagcagaacaagttctggcctaaaagtcaagacccctggttcctctttttggctcgccattagctaactacatgaaccagatcatttggcttgactttctggacctcagtctccccacctgtaaaatggggacagttggaccaggaggtggatggggatttccagttctaacattctgtagctgagcctctggcctctgacgtcacaatatggagctggcctcacccagctctgctgctctgttggtcatgggagcaaggtggacttgccctggaccttccctacttgtgctcctctgttatgggcagctcttgccttggctcaggatcaagggtgaacacagtttaggtgtggctgggaccccaagaagcatgggaccagacaaagggactgggtgcggacaggaccttctcagcacatgatgcccatatccttccctgcagatgacttctacaatgagaccgagaccaagatcttcctgcagttttatgaccaaacaggtgaagttgtgttgaacaagttcatggaggccacttggaactatgtcaccaatatcaccaggaaaaatcaggaggagatgatgtgataccacctccaccccagcctctcctctctttgctctttttagggatttgggaccatggggcaccacanctcctgcccccatcccaagcaagaggaacaagggaagccccagtgtacatgtcaaagagggctgcaagctctgggcctcctggaagccctaancttcctccaggcaagaatctcttgcttcttgtcctttgtaaatctcacctccttgcttttagagatccaggtttctgccctctccctctcagcaaatcttgctccctaagccaatgggattagggagtcagttagggtgccatggccctggaggtcaagtgggacccttcccctgtcccccaaccttggtggctctctttgcagctgcacaaggacatggagaggtcccagttcatgatttactttggcacccaggcccacctgtttaaagtcacccagttcaaggacccggatgtgaatggcatgctgagtaagctgcagaacatagacaaggcggctctgtccaaggacgagctgcgggaggtgatggatggaacccccaggcctttaggcacatgctccctggtcctaggggtctggtaggggagacagagtgcctggggcaggagggaggcagggagtggaggaagggcaggatcagaacttcctctggagaaggagaggagtagaggtgggggtaccgatctctcctggctggtggggcgagcactggggggggacctggggcaccagcctaccctgggtaacacctgtccccccagtataacgagcttctggcctacctggagatgacatacagtatggcccaggtgtgcctgaatgaggggccctgcctgtccctggagtctggtgaacacccaagccctgtcccacccaaccacagaatctccagcactcagtcccttccaggggcccctcccagcccccaaccaccctcccttattgccaggagggtgagggaagaggcaagtgggagtgggtcccccatggctccttttctgggcatagaactcgaagtcatggccacctccagggacaaagaggagctgctgtgggcctggcagggctggcaggatgccgtgggccgccagatctgcaccaccttcgagcactatgtggagctcagcaacaaggctgcacagctcaacggtgagcagatgggatgccacagagcttggagtgatggcaaggaaggggcaaagctgagctttcccagagtgaaggtggccgtagggccctggagacaggacctatgagccctgcagctgggctctccaaatattcatagagcacctaggtgctaggtgctggggaggttctgacgacacataggtgaaaagacaggcacctgccctcatgcacctacggtcctgcagggagacagaccatattcagtaaacacctgtctctcactaccatctggggtgatgcggaataggaagaggctgctgagaaagagaatgagaagaggctgctgcagacaagtggacagggaaggcctctgacatttatccaagacctgaaagatgggcaaaagacgggaagcaagatgtgaaagaagagcagcctaggcagaggctccgcggcaggaggagccggtgctctggaagacctgaaagaagcccaggtggccacagggctaaggatgaggtgggataagaggggactcagggccttgcaggcatggtggggagctcggatcatggactttgctcagtgcctttctgaaatgggcaggtattctccccgttttgccaaagaagacccagacggtcagcgaggttgagtggcttccctagaaggcgtctgggtatcctgtcagctaggccatggctaaagggtgagatggtgagctcctggtgagtcctctctcctgtcctaggttacaaagacatgggggccttgtggcactccaagtatgagtcggataccctggagcaagacctggagcggctattccaggagctgcggccactctacctgaacctgcacacctacgtgcgcagggccctccaccgccactatgggcccgagctcatcgacctgagggggcccatccctgcccacctcctgggtaaaggccctgctggtggccaaggtgagtgccagataagggcagagactgtctccagcctcctcttagcccctctcctcctcttccagagaacacgttggctcagtcctgggtcaacatcttagacccggtcctgcccttcctgaagaagatcccagaggatgtcacaaagatcatgaaagtccaggttagtgcttggcctgtctgtccctgcccctccccactggcatccttggacaaacagggcagcgccccccacaccccctcttctcccatagcactggaagccagagaaaatgttggaagaggctgagacattcttcacctccttggcgctgccacctgccccacccagtttctggaaaaagttgatgctaatgaggccaaccgatgggcgagaggtggagtgtcacatctctgcctggaacttctaccaggacgacgatttcaggtgctcacagcggcaccacacacccggtcctctcctctgccctgtctggctgtcttaggtatgggcaggggaaagccagggcagaggagggagaaggcaagtgagaaacacagaaggaaaggtgacgtgagaggaaagggcttggttgctgggtggatatggggcctggagtaagaaagaacaattgccggccgggcatggtggctcacgcctgtaatcctagcactttgggaggccaaggcagtggatcacgtgaggtcaggagttcgagaccagcctggccaacatggtgaaaccctgtctctactaaaaatacaaaaattagccaggcatggtgacatgtgcctgtaatcccagctaggaggctgaggcaggagaatcactggaacctgggagccggaggctgcagtgagccaagatcgcaccattgcactccagctgggagacacagcaagactccgtctcaaaagaaaaaaaaaaaaaagaacaactgccaaggcctgtctgggctccaacccgaccacccaatccctcaaggagtctgaatggggaaactccctttctccatgctccttgacccatgccctttgcttgtagaataaagaagtgcgcggaagtgaccacagaagacccgctctccatcttccacgaaatgggccattccagtacttcctgcagtacaagaacctctccatcatcttccgcgcaggtgccaacccagcctttgaagaggctgtggggtctgtgatcaccctctcggcctcctcccacaagcacctgctcaacataggcctgctcagcctctagcaccaggactcagaggatgaggatcaagggcccagcaggagggcagcacaagcctgggaccgcagctagggcttggtggggtcagggctctcgggcaaagctacgggaaggagatcccaggggttgcctcttgactgccctcaccctcttcccagaggatgaggtcaatttcctgatgcatattgccctggagaagatcgccttcatcccctttggctacctgatggacctccttcgctggaaggtctttgacggcaccatctggaaggacatctacaatcaggagtggtggaacctcaggtgggttgggcaccatcttccaccagatgggccatttccaggactttctgcagcacaagaacctctctaatcttccacacaggcactgagcaggtcttttagcctttctaggcttcagtctcctcatctgtgaaaaatggaccctggtgatggccccacctgctccctgggtagctgggaagctcacacaatgattgcaactgagcttctctaatcacagaacactgaccaccaggcaggccctcccaaacctccctcccttcctggtgccaggcaatggagtgtgcgggggcctgagcactttcctttctggggaaagactccccatgggagagaggcaggcccctaaaatgcacgcatgcctgcctcgggcttaacatccccaagctgccatgggaacccaccagcagttgggaggcatcactctcgagtgagggacccccgtgttacacctcatcactgacccctggccatttgatgggataataaatgcctgtgaccagggctcctccatatgtggcaggccgcggactgaccagcttcagtctgctggtcatagtgtgattcggggttgccagggggtgctcctggctctgcaacaggctcttactttttttgtttgttttttgagacagggcctcgctctgtcactcaggctggagtatagtggtatgatcacggctcactgcagccctgacctcccagcctcaaccaatcctccttcctcagcctcctgagtagctgggactataggtgtgcgccactatactggctagttttgtgtaatttttttttaagagatggggttcgccatgttgcccaggtttaaactcctgggctcaagggatctgcctgcctaggcctcccaaaatgcggggattacaggcatgagccactgtgcccggcctcttatgtttaatttgaacatttacaaccaccttgcgttgtgatcacttcaaagcgctcagctcacagaagcaacagctgaagctcacagaggtcacaaaccagcccgaggtcacacagcaaacgagcaggtgacagagctgggagctcctccccttgtcctctnactcccacccttgacttcaggagcaggtctccctggtgggcttggcagagtcttgacctcgtgcctctctaaggtcaccctcataggccatctgaggcacctgcaggaggcctctgtcagccctgcccatcaccccagctgatggaaccctggggctaagcaggaggggtggcaactccctgggccttgaataaggccctgtcaactgggagggaagctcctgacactctgttgaccttggagatggttcagaggctccagtgagccaatgatgaagccttgtttttgagacagggtctcactctgttgcccaggctggagtgcagtggtgcaatcatggctcactgcagccctgacctcctgggctcaagcgatcctcctgcctcagcacctgagtagctgggactacagttgcgcaccagaacacctggctcatttttgtattttttgtggggacagggtctcactttgttgcccaggctggtctcgaactcctgggctcaagcaatcctcccacatcagcctctcaaagtgctgggattacaggtgtgagccaccacacctggcctacttccttccattttatagacattttacaacaagactcggagacaatcagcaactttcccacagtcgcacatctcagaggggcaaaaacagaccttcaggttatcagggtgtgactgtgactggctctgtgtcctgaggccaattccctgatctccaaaccttggtttcctcatctgcaaaatgggaataatagtagtactgccccacagtgatgttactcttttttcttctcaagacttcttactagatgaaatgaccttgtttattggtctataatctgtcccccactgttaggatgcaagcaggggccttgcctcccccgctcccccactggtccctcccccagagaccaggacggtgttgagtgcatgatgcgtgagtctatgtggagagccagacatggttctgagcatagaggaagtgttcagtcagtgttaactgctattgttttactctgattcccaatcccatgtgttttcatttatttaatcaataaaaatgcattaggtatcctcagcctgccaagtccagttttgatagacacgtaggtgctttgaaaagaaaaaggcaggccaggtgcggtggctcacgcctataatcccagctacttgggaagctgagacaagagactcacttgaacccagggtggggaggttacagtgagctgagatcacgccactgaacttcagcctgggcaacagggcaagactctgaaaaaaaaaaaaaaagaaagaagaaaagaaggaaaggaagaaaggagggagggagggagggagggagggaaggaaggaaggaaggaaggaaggaaggaaggaaggaaggaaggaaggaaggaaggaaggaaaagaaagaggctctgagaacctgccagacaccaccaccaagccctctgccttttccctgccaggttgaaataccagggcttgtgccccgctattcctcactcagaggaagactttgatccaggtgccaagttccacttttctgcaggtgtgccctacatacggtaaaggtctgggccctgttagcagtgccagtcctaggagttgaggggcatgggaactggggtgaggatttgcaggaaggccctaggtccaaatgtcaccctgtacccgtgcccatctcttcctgttgggctgtgcagccttctgaggcctctgacctagaatcctttgagcttttgcatcaggtccagtgtagagggcagagctgatgagaatattctagaccatccctgctgtcccttggaggagagcaggtcagaggggggcaagggttggggtgactgctggttcagaaagctagagaaggagagccccccagcactctagggtcagcccaagactgggccctgcccaaggagcctccgctcaggcagtgactgctgacatggggccctcgtggccactgcatgtcagagctgcctggtcccaagtggctctgagtttcccactcctggtctccactccccagcctgccctcacgtttctcaaccaggtacttcctcagtctggtgctccagttccagttccacgaaacactgtgcaaagcctcgggccacatgggtccactgcaccagtgtgacatctacaactccaagattgccgggaagctcctggggtgagtgccctctccttcatttgttctgggctcccccatctccctttaaggaagtcctgctccaggctccctctccacacctgactacactagacaccttgagcagagcttcattaagcttatattctagcggaatttcttcctcatgtcagactgcagtctttcctacattaatcagagcccatttcctcttgtgtagccttctgtgttcagagacactgcttaggctgggcgcagtggctcatgcatgtaatcccagcactttgggaagtcgaggcaggcggatcacctgagggcaggagtttgaaaccagcctggccaacatagtgaaaccccgtctctaccaaaaatacaaaaattagccgggcgtgatggcaggcacttgtaatcccagctacttgagaggctgaggcaggagaatcacttgaatgtgggaggtggatgttgcagtgagccgagactgcaccattgcactccagcctgggcaacaaggtgaaactccatctcaaaaaaaaaaaaagaaagaaagaaaagacaatgtttagcccctcccactaacacacacacacacacacatgcacacacatatgccagtaagccaaactgtcccagataggaagccagcactggggttctacctcaggcttcagccttccgtccgaatcccccttatcctttccttacaaggtgctgacctaccctctcagcagcacttggcacacccttcagtgcagtctgtttctcccacctcttcttggaggtgcccaaatccagttcccaggctgatccaggttactttcacagtagcctcttggcatgcttctggtcagcctgtggtccactttgacccttgagtctttttctctgcacttggtgtttagcttattctttccatgcttacctatgtggcagtggtttttagtcccaaagcaaaccctgagggagtaggggactgaactgaaaatgtgaagcatttactactacaggaggtgctctctgatgagtactcttacagtgtttcatattataataatagctcttaactttgcaaagtggatattattatctgccttttacaaattatgaaactgaaggcaagagaggtggtgtcgttgtgcatcattcatctagcaagaagcaaagtcatgctttgaaaccagaactgactccagaacacattatctttcaccctgttcgcctccatcattcaaagaatacagcccctggtgagcttagatccaggtctaactggttccaagatcagcactccaaccttggagatgtggagctcacccaccgacttgatcattttcctgttgaatttcaacggatttcaataggtccatttccctaattggtcaaggtcatcttgagctttattcctgtctcctagaggattaacactgccacaaatttagtatcctttgcaaatttaatgagcatatttttgattccaccatgcaatttatctgtagccaccaggccagatggggtttcaggactgatcccctgggctttgctcctagggagggctgcaccttgcatgactgttgtctccctagtagatttgctcttccatcctttcacgtctcagggctttattctagctgattgcccagctttgagcttttctgaacatgttgaacataagggcacctctctgctctttgcattcctatctctggctgcctgtcatttattcattcagtaaacatttacttgtcctcatgcagaccagctgctctgcatccaacaggggtagatgaaccacaggataaataaatttcatggccgggcatggtggctcacacctgtaatcccagcactttgggaggctgaggctggcggatcacctgaggttaggagttcgagaccagcctgcccaacatggaaaaaccccgtctctactaaaaatacaaaaaattagctgagagtggtgatggttgcctgtaatcgcagctacttggaaggctgaggcaggagaattgcttgaacctgggaggcggaggttgcagtgagccgagatcatgccactgcactccagcctgggcgacaagagggaaactccatctcaaataaataaataaataaataagtaaataaataaatttcataataccaggcaatggaaaggggctttcgtgaacatagaaagaggattaggaggtcatgctgggggaccaaggagggagttttgtcctcaaatgcaagtgtgcaagaaatagcagaaagcaggcatggtggctcatacctataacctcaaaactttggaaaagccaagatgggaggatcccttaaacctaggagtttgagaccagagtgggcaacatggttagatcctgtatctacaaaaaatgaacaaaatttggccaggcatggtggcacgcacttgtagtcccaactactcaggaggctgaggtaggaggatcacttaagcctgggaggtcgaggctgcagtgaactgagatcacaccactgtgcttcaccctcggcaacagagcgagacccccgtttaaaaaaaaaaaaaaaaaaggagaagaagaaagagaaaaaaatagcagatatctgttttcttttcttttcttttcctctcttcttttcttttctgtttttgagacagtctcactctgtcacccaggctggactgcggtggtatgatctcgactcactacaacctccacctcctgggatcaagcaattctcgtgcctcagcctccagagtagctgggattacaggcacacaccaccacgcctggttaatttttgcatttttagtagagacggggttctaccatgctggccaggctggtctcgaacgtctggcctcaagggatccacccacctcagcctccaaaagtgctgggattacaggtgtgagccaccacgcctggccaagatatctgttttcttttacatcaactcacctctttcatcccacctgattggtgggatgtttgacctcagtcattttcaccacttcccacgctcaccccactcaaggtgcacagggctctcagggtctgacttggcaccaaagcatgtggccagtgagtcatctcttgtcattgctcaccagtccctgtgtgtccctggccagactcctgctcagggaaaatcctgattccaggcttaggacttcacataccattttgtgagccgtgggcagaggaaaggtttctgagtaaggaggatatcatgacctttgcagatgatgaaatagcagcagagccgaatatggtttgtggaggggagaggggatgtgagtgcttgcagggggaaaagagaaagattcttggctgctcttttgcctaattgatcttaaaacttggttttgctacttttgattcatcctcctaaatgtgatggccctgagtcaggctctgggctgcttctgttgggaatggagggttgaattgggcctggtcaaagttctcaaagtcacccagcttcaccccaccagccatggtgcgcctgaccttgtccatggggtgtgttgttgtcactttggagttgaaagctccaggcagcatctagttgtcatctctgctgctctctggtctcatgtcctgtccacatgggctgttggctgccctttggtcaaacatcttgtcccacccagcctgaaggactgtttctaaatgggtagattctcaatggttgaagcttttcccctactaggttcttcctcttactcaggagccagcatcagaacctcttacctagagttagttgtggtttttcttctccagtggtatctgccaaggccccactgacctttggtttccctaactctttcttttccagttgtttattaagtgatgcgcataagcctttgcaagctacaaaccctccttcatcattgtgggacttagtcctcatcacaatgagggcaggtattcatggctcccattttactgatgaggaaactgaggccgagagaggctaagttgtctgcttaaggttatgcagtccataagtagcactgctaggtcaggtttaagcctgggccctgttagtctagactctagatcgtgacctctgggcctctgggtcccaagtctgtcctgagagttggatcaaggaacaacaggttgtgaaggataaacatctgcccaccactgcctctcctggggactctggagtggagaagcctggagccctggcttcagcacaccttatactcccattgtgagcccaagggacctagcataaagttcaaccacctgcccctaaggaccgggtgtgccgtgaaacacagctgacatttgtgcagcactacaggtggtgtgcggagcacctcccatgctcatgatgtttctaatcctcccaaaccctccctgaaaccagaaaggggtgaagagctgccactatctaccaacaccgagcacctcacgggaaacagtgtctcaggactttatgcctatttgagtccaggagaataataatcatcacagtattaccagtagtactaggaatcatcatcatcatcagtagttaacgtgtattgcctgcatgctatgctcccagcaccgtgtttatttaatcattacaatggctcttcgaggtagataccattatcatctccgttttatggatatggaaactgaggctcagaaaggttacttgcccaaggccccacagctactaaatggcagagctgagattcaaacccagattaatcttctttcaaacttgtgattgtatccactatgccaagctctgcgggaaagttctggctggccaatcgctggggctgggattgggtgcactgggggtctcagctgcaccagctgatgccctcacacagcctcacagctgcacccactcccctagggatgctctaaagctgggctcaagcaagccctggccagaggtcctaaagatgctgactggggagtctgaggtgtctacaaatgtcttcatgacctacttcaaacccctactgacctggctggtgacagaacatgcagcaaggggacatcttaggctggccagacttcagctgttcctttgaaggtttgataatctgaccctggttccagctctgggccagccccaggctccaccttaccctgctctgtcctagtacctacccctacccagccttaacccctggctcattcatgacctggcttgaatcaacagcactgctgctgtgggaccctgtctgtaccaggcctgatgcagcttcagccaagaccaccgctcccaccacagcccctggctcagttgcttccttgcacactgtccagctaggttgccaggctgacatctgagcaaaggatcagcatcttgcctctggtcccttgcatgcaggggcatgtagtccaatcagatctcctctgacagccacaggagaccccaggggtccctctccagttctacccaccctatgagactcctatgtcttccacagaaaaagacacagacaaagtgacattcctgagtctgaagctggaccccaaccaggctaaatttgggtactgggtgctgttggccctgggctttgtcatgtctctggtggtgctggggctggcctgcaggctgcagtccctggaaaaacagtcactgactcaagacactgagatattcagcccactgcccaatgcctgcttcctgggcatagccatggaaccctgccaggctgctaaaggacagtggatgctgctgggcctctgccttgtcctgatgctgtgctcaatcagcctggccatctggattttcacacagtaaagcaggaagcctccaagggtaagagctgaatggtgaagttgggactagacaccagtgaactggtgaggctggggggcaggaggagggaggctgagccagagagttggggggcagaggaggggacagcctgcatgcatagtgcccaattataattgggttcagctgtggcagatctgggtacatgtgatattgtaattgtgtgtttgcaaactcatgtatgtgaggctgtgtgcacaaacaactggctctatgtgattctatgtgtgtcctgggtttcaggccaaactccttcccctggtggctcaggacctaaggttttattgacccagtggctgtgtccctgcaaaccagcccccaccccaagtcatgcccagaattggttctgcacacagccttgtttttttcagtaacccggctatgggactgcagtgcccaaggaatttctgctctggttagaaaaaggactctgcttcagtccacttctgctctggttagaaaaaggactctgcttcagtccacagtacataaaatgtactcaggtaggacaggacattcctttacgaatcaccagtgcccagtttatgagcactgtgcttttataccaaccagcacatctttctgctaatccttgggccagccctgtgttggactacataatccagcccccaaaagctctttgttgaccagttgagatgtaagtagcctcacaaactgccccatggctctctctgccccagcccaagcccttccaaatggagacagtgggttgctgggcattgagccaggcttgattaatgattgacttctttaatatttaaacaaagctcatctccaaccactctgctctggagatggccttgttcaacacacacacacctgctgcctggcccgttgccctggggagcgagcataggacaaacagcacctttncaggctcagtgggggatggggaggacaggaaggagggaactgtaggagaatacttgggaaattagtgctctagaaacaagcctggggaaagaacgggaaggcctctgcctctgcctttcctagttcattatcctcagcctgggtctgcctgccatgaggatcctacattcaatattggggattcagagcgtctggatggaggttgcatgggctcctggggaggctgggagtcagtgtctgtcagagaatagggaaaacttgaggggaaagggcattatagccagtaactacagagaaggggtaccccggctgcaactgagctggtgggagggtggccaaaagaggagaccaggtctctctgaattaagaatctgagccccaaactcaggtgttcaggggacagagatactaggctgagatctccatggaccctgcccctgtccaggtttcaaaaggtctttctgagatctggctgagcccaagcacttgctccagccccaggctccacagcacccttgtttgatgactctgtccctgctcttacttttctgtgccataatgtccttatttgtccctattactagctatcagctctataagagctggatgcacatcaggagtgtgcccctctgtaacaactctagtcagcacaggccatggtgcacaaaagggacttggaaaatgatggaatgagtaagtgaatgaatgaatgaatgaatgtcccactgcccaagtccctcctcagagctcagcaccccatgtactgagctcatgagaaatagccccttcttttcctccacagccagcctgtccaacagaggggcagccaggacatctctgccctcttctcatcccccagccacagtggccaaagaggcccccactaggcactgtggctctgcatgacaaacacacatccagcccaggactctaagcctctcacctggactccagtaaaaaccttgctgagcctccttgtctatccttcctcccccacccaccattgtaaagtttatgtcaccagaatatttctttcatgtctaattgcttaagaacttggttgttcatcaattaaatctagatgttcaaaatggcatctgagggtctttattaattacctccttcctccaaactcacctctcccacacccccttgttccccccaccccagcccctctgcactgacatcacctttggcctttgcctaaggtgcatgccccatttgaatgcttgccctccaagatcaggctcaaaattgctcaccaaaccctctgcagcactacaagcccacccagatgctcagtgaacagtagtccccttctccccttcctctccaggaagcctctttcaataaacctattcccacccccatttgctttttctagtgtgttcattttcagtcagtactcagtactcagacacttttatcagtggtcacttgctaataggtggttttaaatctgttctccttccaagatgtacctgtatgctaagagctctcaggcctctgaagaaggcatcttattgcatacttctttctttctttctttttattttcagatggagtctcgcgtctcgctctgtctaccaggctggagtacagtggcgcaatctcggctcactgcaacctccgcctcccgggtacaagcgattctcccacttcagcctcccaagtagctgggattataggtttgcgccaccactcagctaatttttgttttttcagtagagacagggcttcgccatgttggccaggctggtctcaaactcctgacctcaggtaatctgcccacctctgcctcccaaagtgctgggattacaggcgtgagccaccgcgcctggcccttattgcatatttcttgcacgtcttcatgtgtactcctaccccctcctctcaggaccaggccctggctggacttggcggcaggagctctgcatgggacctaggtctcagctgagctggagatcacttgctataagagcaggccagaggcctaatggtatcattgccagggtcgggcccagtggtcagacccggaagaaagctttcagccaaagaccacctgaggcccctaacaaccccatc

SEQ ID NO: 2 - DNA, 12424 bp, Homo sapiens
  modified_base (5810)..(5810): n is t or c
  modified_base (10530)..(10530): n is c or t
gacaaccctttcattgctcttgacaccgtgggtcaggaatttgggtaaagctcatttggatggctcatttttgttcctcgtggtgttgggaaggcttgacgagagctagagatccaagaaggcctcactcatgtgttggacacctcagttctctttggacttttttctatccaagtggtttctggagagggctatatttgggagtgatctgtcatacttctctttgctatcggatttctatcttcatcatgccatcatcactcaggctatcatcatcacccggtcttatcagatattgccaaattatgatgtcataacttactatgactgtccccactgtccatgaaaaaacacagaaaagattagatacttctcagggaggtccctgttcatctttatggcctcactttagtcctctcagaaggtactctttttcttcaatcttcctcagtgcaaatatccaccctcaatcaacatcaacatgggttggtgttactccaattcactcctctttttcttttctttttttttttgtttttgtttttttgagatggagtctcgctctgtcacccaggctggagtgcagtggcgtgatcttggctcacggcaacctctgactcccaggttcacgccattctcctgacttagcctcctgagtagctgggactacaggcacctgccacaacgcttggctaattttttgtatttttagtaaaaagacggggtttcaccgtgttagccaggatggtctccatctcctggccttgtgatccgcccgccttggcctcccaagtgccgggattacaggcgtgaaccaccgtgcctggccttcattctcctctttctataacgcaatcttaggatgcaaaaccaagcaaagtctgaattaatctatctagaatagcaccgtggagtcacagccatggtcaggcccctccaaagaacagactggatttcggaacccatgtctctccctgccacaagcaactagtccatatgcaacttggaagcagccactgtggatcttggcttctttcttgcttcctcctcaatagttactgccactgatttagtgctaaagagataggaacatcacttaaaaccatctctacacataaatccacttagaataattttttcccctggaggatctattattgaagtacaaggctttactgtttattctactgtagacaccacaggacaccatgttcttggttagaattgagtacttgagaaactatatgaataattgcttgttgaacagtacacgtgaattatctctattttccagctaaagattgagcctaaaatgattagtatttttgtaattttgaatcatttgatccatttgaagttggattagtgacaaagtcttattcatttttcaagtgttagttctgagggcttctcccagaactagcagcaaccagcgttgctgctagataatattgcacctttaagctaacaagtaaaaagctgatcctctgggttgatgttgtctcatgctagggctctaggcagagtgggctggagttcagtccccagccatcttcttagcagggcattctagatgtttaatcttttatgttgacgtgttgatatcacttccattagccatttgttagaattactaaattaaatttacataattcaaggatctaaaaagaccagaagttcagtcagagccatttttctgagatatttctgcatccctctgaagaagataatttgtccaaacttaacaaaaacaggtgttaaaattgagtacgttctgagaatactcagactttttttaagactttttttagtctcaaaccctacatgaaatacaatcccttaaatcttccaatcttagagctagaagaaaagtcgagcaccctcactttacccagaggcaattttgtgccccagatgacaaagctcttagatctactcatttgcttatggctccaccagtacttctaggtcaggccctctttcacctgaaggattagccatacttctggaaccattttccaggttccttgaaataaatatcttcgctttgctggggaccctagtttcctgttaagtagtgaatgacccttctttcctcccgccagccacagtcctatttcacagaggaagagaatgaccagcaagtcaacttctactacagagaagcagcaactgataaaaggccaaatcttacaaggtgccaacgtgaagaaaaaggcccactatcctgcagccaactcatatcaaaagttaatctgtttagtcctctctgccggggtgaatctacagtttttctttttgtctccctcttgccccatcaccaggtggttgtcgttgtccttcccggctagttgccaataaagttgttacaaagtgaccttgagtgtcttccttggtgcacccgaaaccccgccttcttcatccgggtgctgcggcgcgaataagagccggaccgcgcttgcgcattgagtcccactccttcgacctctgccgcagcccgtgccgccgccgcctcctgggaaggtaagtggagggcacagggagcccggcctggccagggcggagcggcgcccagtagggacccattcattgtgccggcgcctcactgggcacggggcccaagctgacggcgtgcacgggagcctgcggggcctgggtgggaagaacaggcccctggagggcacttgaccttaagcctcttttcctccgcagagaggaagcgggagaggagcccacgtcgcctgtcacccaatatctccagccgcgcagtcccgaagagtgtaagatgttcgcctgcgccaagctcgcctgcaccccctctctggtgcgtagcccaggcagggtcggggggattgaggggtgggcgttttggcctagagcgtccacgttgttgaatggggcaaccttcgggcggggcacaccgccctctcgggaacggctttctccttacctattaacccattgccgttttcttcctaatcttagggcatctcagccctctccttgccactagggcgaggcagagcagccgaggcctagctgtcaggcctcactcggtgtaggtcaaactctctggtccctagaccaggagtggccctttcccccaccttctctcagcctctctgttggattggggtcgacgcgaaggttggagtactgcagaggatgtagggggccgttgaggcctagttcacctcagcagcgctttccagtgcctgtctgtaggtcaaactcgttgctgcagagggagggactttgcctttccgtgtgggggcggaggaaggtggtgggggaacgagcccaaagtctttcttcctgcctctggagtattattttcataacaattttgcaggcttaaagtgaggtctagatctggaggatttgtcttagagaatcaggttttggttcggaagggtttttctgtgaccttaatttagtggacactcaagggcagagaagttggactggaatatgtccttatggtcagatatttcacagattattcttaaactgatgtagaattgcttaagttccttttttagaaatttttttttatgattaatggtcatatagaaatagctttgaaatggtcagggctattaactgctgggctattttgaatgataaatgtttattgtgacgctcctaatatacttgttggtccacttaaaattgccaaagaacgtgtggtatttattgcttttttctgacttgacttacggcactacaataatggaaatgtcaaaagcagttcttactctctttgtaactgttattagaaattttattcaaggtagcaagcgttacaatttcattagcatgaaactttattaaaattgcttatgtattaaaaatgaccaaacagcaaagagtcaattcagaagtttctgattcatttttactgcttgcttttttagaattcatggtaccagaaaagtcattgaagtcttacctgtattctttcttaatattgaaatctttatttttttttcattaatagatccgagctggatccagagttgcatacagaccaatttctgcatcagtgttatctcgaccagaggctagtaggactggagaggtaatagtagcaataattgaaattaggtaacactaccaaataagggtagggttttgattagagtgaaggaaaaaaactttattaataagagtttgagggcaagtctttcccacccttttatccaaaaaactagatgagccaaatagccaaaaatagccaaaaaactagatgagacgaatagagaaatttctctatccaaaacttggccaagtatttatattcaagtctattgatttaagttgcctatatttaaaattataatagctacagttattgaaaaatgtactctattggactggatgcggtggctcacacctgtgttcctagcactgtgggaggccaaggagggaggattgcttgaccccaggagttcaagatcagcctgggccacatagtaagatcctgtttctacaaaacatttaaaaattagcccagcctggtggtcacctgtagtgttagctactcaggaggctgaggtggggagctggcttgagcccaggagttcaaggctatagtgagctatgatcacaccacactgtactgcactccagcctgggtgacagaccaggtgagaccttgtctcttttaagaaaaaacaaaacaaaaaaccctactttatttaaaagcatatttatatatgttgtttcttaattttcaacacccttttaagatgtagatattgttatccctgttacacaagagtgagattattctaagctcttgatttgtctctttacactcagctacaaaataaaaaagtagttatcattttgacaatatggtatttaattaaaatagctacctgtggttactgatacgacctttacctttattttctgttttccagggctctacggtatttaatggggcccagaatggtgtgtctcagctaatccaaagggagtttcagaccagtgcaatcagcagagacattgatactgctgccaaatttattggtgcaggtgctgcaacagtaggagtggctggttctggtgctggtattggaacagtctttggcagccttatcattggttatgccaggtaatcatttctatccctaaataagttaagagcatgcttgcagtagttggaaacttagctactgaaataatagctactttgcattaagtgcttactctgtgtcttgcattatatttaaagggctttgtatgcattatctcacttaattctcataacaccatttggggtgttatgagaataacatctatgaaggactagagacacagaggccacattacttgcccaggtcatagctagtaaatgtcagaaaatgaattttaactaagtctgacttcagagtctgcattcctaattgttaagctattttgggaataaaattattagagcacattccttaaaaggatcaatttattttatttaagacctaaactgtcagatcttaaaaggtatagatcatattttcagatggataagaatgtcagaacccatcaaaatgaatgaaaactaaccatttatattgacagacagctccctacctttacaccatattatcaggattgaaggagaatagtgtaagagagatctaggcaaatactcttccagcagacttttcagtttacaaaaatccccacactagtaatctgattctttaacatttaccaaacatgttgaaattaatatttcaaagtaacagtcatatgtggtctcttttagaaacccttcgctgaagcagcagctgttctcatangctatcctgggatttgccttgtctgaagctatgggtctcttttgtttgatggttgctttcttgattttgtttgccatgtaacaaattactgcttgacatgttggcattcatattaattacggatgtaattctgtgtatcttactgtgactccgaaaactgtagtattggtgtcatgggaatgtacgttatttccaaagtcatttcattaaagatgaaaactttaatttcttctgtgatttgtacttacactaagtttagattatcacaaagaagaacgtgcattcaggcagatgctgtcccattcagaggaagctacagcagttgctccactgatgaaaaatattccaatgtaatttttatgggaattcttttatatagtgttctgcatattgtaattcatagggcttttgtttattcatataaaggataaatatttgggtgttttgagcttctataaaatatgattaattaaaggtagttaatactcaagatggtcttgagtttttaaggtctaacatcagttagaatacttcaaatcagaatcaccttccaagactgacttgacaggtggttctaaaaataaatcacgtcagctttttaggaaatgaagccttaagctagggggtaatgtgacttttgtttttcagtaagtctcacattaagcaattgtgtgcctctaatgaatcttccatgtcttttcagaacaggctcagtccaactagcagctagtttcttacttgaacaagactattaaaaaccaaatatcaaaaaactgaattggctagatttttacagccaaaaattgctgtaaggcagtgtgtatcactgttgctaacatgtttatagtgggagtcttggggatgatagctggttcaacagtattttgctgctaatactttatgttgcttcttggtcaaacttttcccattcaaaggaagaagatggtgctactatagacagtttttcccctagcaaatatattgtaccataatatctatcatccaagtttcagggttttttgaaagttgataattaggaaagtgacattttacttttcttagtgccctttgcctgtttgatttccattgagaaagagcagtcaccaaagttcctcaagtgtcggaagaccacctccatcagaatcagtgcttgtttaaaaaataaaaatccctaggttccagacctactgaattggactctttggacatgagactcagcaatctacatctttaaaaaggcttcccaggtggtttttgtgcatactgtttgagagtcactaagttatatatatatcctaccttctgtaaagtgaaatgaggccccaaaaagctaaagaggtagagctgctacctcgtttttagttgattcatcatctagtctatatcacccaaaagaattggaaataggtattcaaacaaaaacctgtatacaagtattcatagaagcactacttacaatagccgaaaggtagaaacaaccaaatgtctatcagctgatgaatggataagtaaaatacatccatataatggaatattcagccatgaaaaggaatgaggcactgatacataatgaatagatgtgagtgaaccctaagaaagcatgctaagtggaagaagccagccacatgattccatttatatgaaatatccaaaataggcaaatccacggtgacaaagccaattagtagttatcaggaactagggagggggtgaaaagggagtgactgcgtaatgcgtatggggattccttttaggatgatgaaaattggatgaattacagctggtctgatggtagtgggttatcagaacttattaacattagtgtcattaaagttggtatatagcccctcactgctaaatctggctcaaaaattaaaagattattaaaatttgatgaattagtggtgatggttgcacaacattgtaaatataataaatgtcactgaattgtacactttaaggtggttaaaatggcaaattttacatgtcttactgaaactactatttaatacaaagtacatagtataaaattttaaaagtgataggaaaatgcttagattaatattcacctattccaagtatattttaaataaaaacagtcttggtaaagacctgttcttggtgctggttttggtggttgaaaaggcttgaaacgttgatttgggaacaggtttcttgtaagagatgtcccagctgagggaatctcccagaatgaaaatggactaactgaactgtggctgcatagtcttcaggctactgagaaaacaatacaacaaaaaaccacacacaatgactcaaactttatagaggggaaaggtaatagtgcatcacaagtttaacatccttgagtatacatccttttacttaacttttgtttctagtaacaaagttatgacattgcaagtacatcactggaatgcatctactagcagaaatgtttattgtacaccatttttataggaagtactgcctcagcttacgagctttgcaaacaaatattagtgctaaatgctttttactgacatcttcgtttctgaacagaagctgataaaggtactatttttctgtcaaacatgaaatggattttccatgttgataagatggtgttggtaaaatggtgaattaaatgagtggcagtaagtgttcaggtgttcagagggagtagaaataattttatagttgaagaattacatgaaaaagtactatttgtaacttaagacaaaccttaaagaaccgtgtcacaaggacagaccagaagagggcattttggctagtgaacggcatgaggaaaagtaaatgagcacagcattggtacatgagaaacaaggagttccctgagtatgaaacagaaatggtgtgagataaggctgtaaaggaagactggggccattttatgtaaacaggcaggtataagattgtgacttttattcatgtgatactgtcagtcattcaaagtttagagctgtattttagaaaggttgataggagaccagtatgtgagatggactggagccagcaatgaacagcagttcatactatagtagctttgctgaaatgtaatgaaggtctagtctaggatggtggcagtgaagacagttgaccccctgaacaacatgggtttgaactgtgcaggtccacttatacacagatttttttcaatatgttggaaagttttttgaggtttgtaacaaattgaaaaaactctcagacaaaccatgtagcctaaaaataattgagaaaattaagaaaatggtatgaatgcataaaatatgtagatactggtctactttactgccataaaatatacataaatctattacaaaaacaaatttatcaaaacatgcacatagactacatggtaccatttacagttgagaaatataaacgtagagatggagtaaatcatagctgcataaaattaactgaagaacatactgtactactgtaataatttagtggccacctcctgttgctattgtagtgagcttaagtgttatgagtatccacttaaaatgctgtgatgctcatcatcttcatggggcagttcatctccagtaaattgtgtatcacaaaaaaagtgatctttcgcagttcttgcctttttttttttttttttttttttttttgagatgaagtctctctcgtctcccaggctggaatgcaatggcggctcactgccaacttccacctcccgggttcaagcgattctcctgcctcagcctcctgagtagttgggattacaggcacctgccaccacacccagctaatttttgtatttttagtagagatggggtttcaccatgttggccaggctgatctcgaactccttacctcaggtgaccctgccgcagcctcccaaagtgctaggactacaggcgtgagccaccgtgcccggccatttcttgcatatttttcactgagttagtgcaatattataaaccttgaataacaccatggaacctatacaaagtactagtagtgatgctagaagcggtcccacgatgcgaagtcatgacattgcaagaagttgaatggcttgatatgcaccataggtagaagacgtccgcagctgcagttgtcaccatttcagacagacagttcatcttgtaaacagatggtgtaaacttgtaaacttaatgatattgatatagtactagaaatgtattttctcttaggattttcttaacattttcttttctccacctttattgtaagaatacagtatgtaatgtatatagagtacaaaatttgtttatcaactatgtaatcagtaaggcttctggtcaacagtaggctgttagtagttaagtttggaggaagtcaaaagctatatgcaaatttttttattgcatgggaggctggtggggggaatcaatgccctgaacccctaaccttattcaaggatccactatattttaaaaagagtgcaaaggtagtatcagtaggatttaatgcctagatctcaggaaccagttaggagaagagagggtgtgtgcatctagtaagtgctagctatactgttatttaaccctcataacaactctgtaaacttgggaataatttccaagatgcaaaggaaaataggctcagaggttaaacagttcccaaaattacatagctattaagtggcaaagtcaggatccaaattcagatcttccttaaagcccatgctctgattttttttttttaatatgactgttagcaatgacaaggaaaaacntgatttggggaaatgatgaactttgttttttatataattttaaatacaagaggtataattttacagatctgggcttgaaaagagaagaaaggtatgtacagcacagactagatgtgcataagagaagtgcagagcagcagtagggacccagctccacacaggtaacaaattggtagtgaacatcattcacctagttttgtgactctccagcaatgttgggaagcttgctaatacaaactgatgtaaagagcagtgagggttatcagggttgtgcactgggaagaagagatgatggaaggtcaaagtggctctaggcagacagcaaacaagcgcactgttcaacaaaatgacctatgcatttcaaactgggtaaggaacaagggaagacacaataaaggtgataaattgaaataacagaggggtcaagagctcagaggtttcactaatgttgaaaagccatttcaataagaaccaaaaaatacacaagaaatttaaagaatttcagagttcaagatcttggaaataaggtaggctcgaggaatgatcaaaatttgaggtcaagttgctgagtgattgaagttgggtagaaataaatgtaaatgctgttaattttaaggcaggattgtagataaatgggaaataacatttgagaaccaaataaactacttgtgcttctgctgtaaattttaagttctgttagacaaatttagtgaatatggtttggtttgggtgttgggtacttggaagaggaaaaaattgtattgttatggtcctacgtgcaaagccttttaaaatattttgtgatttctacataggaaattataaatgagttgttgattcctctacatgctgagcatatcaacgtagttatttcatattataattctactgacagtgttatggacttaacacccaaatacatggtccatcagttacttgcccaattctttacattattaagggcaaaaaaatattatttccctaaaaactggttcaggttcctggcaagaatttgcacttctttctcctgaattgacaaaagtaatgtgtctcctctgagacatttagtgacttcgatcttctttctcaagggagcttaaatattggagagaggaagtaaagagagtacctaagaccaatagagactcataaatccaagagcttttggttgttcctcccattagcatgagctagcatcctacaacttattatggcagagactcctgaggacccatgattgttgtcagtggcgcttcaacaacagcttttagtcagcacttcccagccatggagactccaggatctcctcttataattgcatcccaggctttgcttcctcaaatagctacacaggttggctgagtctctcagctgccagacatcgcagtatttttccctcaagagttgtatcttaaggacaactcacagaattctccgaccactctagtgctatctaaagtgtctgttactttcaagttctctaaagttgtatttaaaaagcaagttctaatattgtatgttattacaccccggctttattttctccatagtacttaccacaatttaaattatcttgtttatatatgtagcatgtctccccctgcccctgcacccaaccacaagagtctcctgaaaaaactttgtcttatttatagttgtcacctcagagccagaaacagtgcctggaatgttcatgctcaattaatatagatgctttatgagtaaggagagcattaggttgatgcttgacctcattggccatagttgacctatgaggctgtatccaaggtaagaaggtaactgaaacgagcaggatggtagtctaaggacccaggaggatccatatgctgacagacctcccttgatttctaggatacagatcacatggctttgg

SEQ ID NO: 3 - DNA, 48100 bp, Homo sapiens
  modified_base (273)..(273): n is a or g
  modified_base (12963)..(12963): n is c or t
  modified_base (24774)..(24774): n is a or g
  modified_base (31091)..(31091): n is t or c
  modified_base (36225)..(36225): n is g or c
  modified_base (45435)..(45435): n is c or g
  modified_base (47751)..(47751): n is g or t
  modified_base (47852)..(47852): n is t or c
ctactgtgaagctagcagtgtactaggtgctggccataagccacgcatggtaccttccttcatggaaacggcatgctgtttcatatattctacagtaaccttccaaggaaggtgagtttattcccagtttacacatgaaggtctttgtgcctaagtgactgaccccaggtgtccctcagccagttaagtgtctgaatgagaatttacaccaaggttggcataattctaaagccaacacttttcatcctatcaagttgtccagggagtaataangtgacctagacatgctggcccagaaagccagagatgctgttgggccaagcaaaccatgcctgtgaaggtgctcactctggactgataactggctttgttcaggtagctatgggaaggatagttggcagtagcaggttcccagaggcgtgttggtagcctcagattctggcactggtaaaactcagacatggcaggtttcaagtgggcatcagggttttgcccagagtgagctgcttattaattttttctttttttttttttttttgagacggagtctcgctcttgttgcctaggctggagtgcagtggcgcgatctcagctcactgcagcctctgcctcccgggttcaagtgattctcctgcctcagcctcccaagtagctgggattacaggcatgcgccaccacacctggctaattttgtatttttagtagagatggggtttctccatgttggtcaagctggtttcaaactcccaacctcaggtgatccgcctgcctcagcctcccaaaatgctgggattacaggcatgaaccaccgtgcctggccccggccaattttttcattgttaaaaccctctcaggccctgccaatagatgacagtggtgtgcgtgtggggagaaggtggcctgccccaggtatctctacttagtggtggagtgatgcttcaaggactgaaagtgtagacccttagccagattactgcctgcctggagtcacctgatgaaatgctgaacctgttcggctgtcttgtccatctgtctctcccgcctgtaaaatggaataatgatagccagctgccatagcttgactcgagtaaaggatctagcacaaaagcccttctcctgccataattgtagggtggaaaccctttaatgaatgggcagcttccctcagagaactgactcttccccctagagtttctccttgagaaacaaagtccctgtgatactttcctggaatgttgtatacatgaccttccccgaagggacacaagtgtttctggtgctttccaatgggaatgtgggaagggacccaggtgggccttgccactttgggattgctgtccctgaagaaatcccttagcctgatagaaacgtaattgttgggagcaatgaactgtgttgggggagaaaacataacttggcctttcttaagctgtatggctcagtggtctgagtttctgtagatctcttattgcctaatgtggcttcttcagatggatgtatgcttagttgaagcacctcagctccctttgcagatagtggcagttctgtggttttcttagggaaaccccattagaaaccccaaatgtggaaatttttagtaatctcattcgggtcccaaaattaagtagaagtgtctcaggggctcccccttgaaacacctacttcttctgagtgtacatttgaggttgctcttaaaattctgttaccatcacagggttttccagacttcctaggaataatttccccagtagccccacagagccctttagcttctgtcgaaaattacccgggtattttttcagggggctccaatggaacctggagggttttcttgacttttgtatgggtgtccccagatttgtttgggctgcatgaaacagcagttgttatctctgtcccttcccccagcagatatctgtcctgaggccagtgggcttgagcgtcctcctctgtgtccagtctccctggttttgccagtgccctcagccttccatcatggggctttcttgaagcaactgtggttttgcctgagtttaatgtggatagacataggggtaattcccagtgtactgcttttctacggaagtataatctcctactgccttaattaagcagaggccctgtccccacccaacctccaacctaattccacagagtcctccctaaggactccctcttttttctttgaaggagtcactctactcctggatcctcttctcttctgcccctctatccgacagtctgtcttccttgttcccagttggcagacctgagtcaggcaatcccactgggtctttttgtttagcctggggaagagaagacccaggagaatatcaccagcttcagatatctgaaggaagagggactgagtctttttttattggtgtggtacctggcaaaacttggataaatgaaaagaagttaacagttggtagagcttaaattatgtgcagagaagacatttctaacagatttactctgtcctagatttaggagctcctcagggtggaggccacatcttgtccatgcttgtttcctcagcactgagcagaggccttgggcatagcagatacctaattgaagagaaacccactaaatttctgaagaaacagacccttgtcaagccagaataacaataatgggagtggctatttacctaataattcattcgttgagtcaaacaatgtttattgagctcctactgtgtaccatactgggagtatggcagtaaacaaaagtaagcaaaactaagtttctgtcctcatggagctcacattccaatgaggagtgacaggcaataaatatataattacatgtttatatcagatgattgtacatgctatgaagaaaataaagcaggttggggcatagggcatgtctagcaagggagggtggggctgcagttttaaaagagtgatcaaagaaggtgtaagggagaaaaaaatggctttcctctacccttctaggtcctttggctgggctgagaattaaattgacatagacagattaactggaggaaaaataattaattacatagttgtacacaggaatcctacaaaatatgaggctcaaagaagggtcagataattgaagcttatatagcatcctgagctacagaaaagaatatggggcttgggacttctgttaggggcttgagtggcagcaacccaagttatggcagggtgagggaaagaattggtggtggcgtgtgtctgtggtcccagatactgttgagggggtgtactgaggtgggaggatcacttgagcctgggaggtggaggttgcagtgagccgagatcaagccactgcgctccaacctgggtgacagagcaagaccctgtctcaaaaaataaaaataaaaagtctctctggtaataaaatttgtctggagcagccctcttcctaatacagatacctttactagtgtagatttcctttttagatgtgaatttcttttacaaaaggacagcttttcagagctactcttatgtctgcagtttctcagaataaccagttcaaaatatgccaaagaagtatatttttggggtggcatattgttttcctacagtcatattttgggatggtatgtcctgagtcccaacaaaagtattacctaaatttatttgagccaagcgctaaatgaggtaaggaggtggatgatgtaggtaccctacagcaaagggtgtttaaagcagagggaatggactcaggagggagcatgcttgacattttcaaggatgagcaagaaggtcaatgtggctggagaagaaacagcaaaggggaaaagggtagaaggtggggagggaatggttgaggaggaggatggagaagtaggtgggggccagatcgcatacagcattacagaccatgatgaggatttggctttggtggaatggtctgtattccttttttttttttttttgagacagagtctttctctgtctcccagactggagtgcagtggcacgatctctgctcactgcaagctgcacctcctgggttcacgccattctcctgcctcagcctcccaagtagctgggactgcaggtgcccgccaccacacccggctaatttttggtatttttagtagacggggtttcaccatgttagtcaggatggtctcgatctcctgacctcgtgatccgcccgcctcagcctcctaaagtgctggaattacaggcgtgagccaccgtgccaggcctggtctgtattcttaagggtggcaacagggagcccagtgaagaggctggtgcaattgccaggtgaaaaagaatagtggcttggacctagaggtggaggtgtagtgagacggggactggagaataagaccaggcttgcacatggtatattgatgggtccagccatcctggaaaccatatttttcaactacttggaggtcctagaatcaaagttaagtaagatagatgttctttgggaatagttctctccaaatgtgatattctgatgaatggtcctcttccactccaacagtatttctgtctgagtaaatgaaatttgtctgagttcagttcccaactcatccgtgtctacctatgcaagctccttttacctctctgaatcttgggacaaataataatacctgcctcacagggggcgatggtaaagacacagtgaggtatacctgagatgcataaagactggagccatgttggtatcattattcttattatctttccacagaacgcatgtcagagacccattcacggaatcttgagcatccactctcctttttctaaataccatagtgacccatcagcacatctcagagcaggcccttgcagcatttctgttgtagtaggagctccacagtgtttgtgtgcaatggtggtgtaagcactggtcttggagttggaatcccagttctactctcagtctcaccttggccaagtcacttcacccccagtccccagtttccctttatgcaagatggagggtttgaagtaggcaataaaggaatgctggttctctctatccttaggccttgtggcggattccaccattacagcatatttcacattagttatattttaaaatggctctctcctgttgacagatatgtcagcaccttaactaaacccagtgtcaaggcaggctagtttatcactgagcccacaatagtgctaccctatatttatgtaacaccttacagcttccaaagcactttcagatccaccttgcctttttgatccttataaccacccagagaggtgagcaggaaggatgacatctccgtttcaaaggagagaaatcaggtgagaaagatgaattgacttgcccaaggttacatcaggaggaagaggcagtttttggactttcaaattggaacttgactactagcttgctgtgtgaccttgggcaagtcttttaacttgtaaatggctatagtaatgccacctttttctgaagattgggtgaattaattcattcttttaaggctttcatatcatcctagggctcttcactcacatcatctggcttctctttttttacatattgatttttgaaattgtggttttgtataaagaaactgcctttgggaccgtctgctatttggtttcatccctgatgagactctcgggccaagcttgagccttacagtgaactctgagccacacagctttttgggcagcctccagtgctcccctcggaactggaggtttttctccagctcttcaggaaatgccattgcgatgacttccatggactgcttcctgtcccagccctgccggcaagagtgtggaaactggaaagcaatgtccctagaggtccgccccccaaaaactactttttttggacgtgtccctgcctttcctcttgtccattactttctttgctccctaccctttcctccttcacctggcttctgcctccagctgtgatcatcccttcaagatttagaaaatgcctttctacttggttctgccaggccattaccccctaccctaggctaggctgtgagggaggtcagttagaattcctgggttctctccttggctccatcacgcattagcagtttcagtcctggacttcccctggagatgcattaaacctgttgcttgcggtgccctgtgtcatccattaaccctgagttcccctaggagattccaccccacccctgcataggatgggattcttaagagataacttgaggtttggcacatataaatcctgcctcttggaaattgatgataaagggtggagtgaaacagagcctgccttcccctcccccagtcacctttgaggaggaagctagaaggttgaaaaccttgttggacaatcatctgaggaatgggagctggcctgggaggggattggaacgcactcaactatgcctcagatcctttgttcctctcttgaaagggaaacattcccctccctcctccctggccacacacacatacacacgtgcctttgttcccccgagtcaggcagggataggaacatagtgtcccttccaaggagcctgactcgcttccctagagactggcctcctggtcagtgggactgggatatttgctcaggagcccccagcctcgtgtcctttccatagagtcttcgaggctaaaaacttgcctacaaacagctgctgagacttctctgtaattatttcatgggacacccatgtcccaggataaacagtccctccctcttactccagttggtgattaatattattgttaacattactattaatagtatctaacacttattgagtgcttactctatgccagccattgttcaaagtgctttacatgtattaatagatttcattctcacagcagcactctgaagtaggttcttttatccctgtttcacacatgaggaaactgaggtacagagaggttaagcaatttatgcaaagtagcacagttagtaagaggcaaagcctgggagggtagcttccaacctcccccttttaaacgctccactgtgttccctcgtccagtgcgctattgtctaggtgactgctggcattaatccagtgctcactatgtgacagcctttagtgacgctgtttttgttactatcccaacaaccttatcgttataggcactgagatttgggagggcttatagttagccagaggcagagtcagcatttgaaaccaggtctctcttactctgaagcctgtcctttttatctccagtccttaaaaatcttgcaaagtaggtgttgttaccttcattttatggttgagaaaattgaggctcagagaaaagtgatatacccagagcttcacaggctagtaccaagaagagctgggattcacactctactgtcttagtagtctgtattgtcatgattattctttttatgtgcatgataatactttcaatttaccaaactccttttataagttatttcccagtgaagtaggagaggtgggtatgttcagccctgtttccagaggggaaactaagataaggggtcttgtcccacagtaaatggcagcatcagacttagaattcatgttctggcttttaacacagtattatcaatactgtctgcctctcctaaagctggatgtgtggcttggagctgtccttggagtttcatttcttttgttaaatcagcaaatattgacaaatgctttgtaatgtgctaaatgctagtgatactgtggatattgtggtaactgagactgagtcccatccctcaatggtctgtttccatactccacaccttgggtcttgctggtgtccctctgccatctgaatcagtctacatgtgccatccatccttctcctcagctgccagacacaccaggcaagattcattatagttgatatgtattaatcaccttcaacacatacacagacaaaactctggcctcacatttgagacagcttgactccttgctggtggcataacacaaagcaaatcagcttcaaattctcatccataagcctgagagaataatgccaagccaccagagtaagtgaggcatgaatgagaaagtgaaatgtaagtgtgttttttggtaataataacagatactatgggttgagtagttacttgctctgtgccaggtgctgtgtttatcccctcaatataatcatcttacttggttctcacaaatgctctcctgtgaagatggagaatctagggttcagagaggctccctaatgtgtccacagtaacagatcttctaagaggcagagctgggtcttatactcagatgtgtctgatgcaaaagcctataagcgtcattgcttcttacaagcccagactggcttattttaccctgactacctggctcagggcccgcggttgggtgaggactcagccagggcctgctcaatgaacatgaagggttattattagatacaggttaggctacaaaaaaagtttctgcccctaaggaagcaaactcatttgaagcagtaggaatagacctcaaacacttggtgaatggcttgaggcaaactgtgccaaacctgtagagtaaacaccaaaagtggaagaagttgagcccacctgactgcattgctgggccctgggcctctgccaaatgggccagcttccaccatcagctacccagttgattactgggcccagaggcctccaccctcagcctgtatcatcaacctgcaccctttccctagccaactgcattgccaatccagactgtcttctgcatcaacagtggaaagggttaggaaggagagaggtcactgacagcttaaataatcatagctttctcagcaccgtagctttgtacaatttccactgaggcctcagtttcccggtctgtaaatggagataatactaatctcttaatgaagatgatagtaatctcttccttataggcttgctgtttttcctctgcctgtatcactcatcctatggatctgatcagggctctctctcttcttatcattcaggtatcaactcagatatcacctccctagaggtcgccatgtttacatgtttaccatctgtctcctgtagtaaaacataagctctcggagtacacgggctttatcctgtctttcatccccagcatctagcagagtgcttggtacataggaggcacttagcaaatatttgttgaataagtgactgtgtagaccacctcacacggtgtctgatatactcagtcaatgttaggcattgttatgtcttaggaagatgtggaccatgatgggtttaaataggtgaaaagaatgtaacaagagcaggctgtggctgggcgtggtggctcacacctgtaacctcagcactttgggagactgaggcaggtggatcacttgagatcaggagttcgaggctggcctggccaatatgacaaaaccttgtctcttcttttttttttttttttttttttttttgagatggagtcttgctcttgctcagttgcccaggctggagtgcagtggcacgatctcggctcactgcaagctccgcctcccaggttgacgccattctcctgcctcagcctcccgggtagctgggactacaggtgcccgccaccaggcccggctaattttttttgtatttttagtagagacggggtttcaccgtgttagccaggatggtctcgatctcctgacctcgtgatccacccgcctcagcctcccaaagcactgggattacaggcatgagccaccgcacccggctcgtctcttctaaaaatacaaaaattagcagggtgtggtggcgggcgcctgtaatcccagctacttgggaggctgagtcaggagaatcacttgaggccgggaaatggaggttgcagtgagctgaaatcatgccattgcactccagcttgggcgacagagggagactctgccacacacacacacaccaaaaagatcaggctagttacacacgcgtgcacgcgcgcacacacacacacgagcaggccagacgggtaagaaccacccagacagaactggagggtggagtatgtatgaagcatttgagagatcatgaggaggcagactggctagagccaaagatggtctgtgtcagcaataaagttggtcagggaagaaaccaggtggctgatgacagaggcctctggacagagggatggttgatggtagaggtgggcctaatggggagaggcccagagcacctgtgggatgcagttaggtctcagtaacccctaagaaaaagaatctcttgccagccagggctcagcaggcagagctgcagggagagaaaagccagaggcacctgcaacctgcagatcaggtaagctgccctggttgttattttgggactcagggccaggtgcagattcaaaggattgattgaagccttttggcaactctggcctcagcagggtaaacatcacctgtctcctgccacctgcagtgacaatgccaggaagggtaccctaggtaggcccaaaggggcctaactttcttgctgccctggtggagcaagaaatatcttctaggagaggccaatccttccctgccccacagctccttctctgcaaagctcaggtggcaatcaggtacctcctgcccaagaggcccccatggttctggcctaaggaaggcagggcggggcattgggagccgttgacagctgggctcagctggggggaggggtcagtttgggagcaggtgcagatttcagggagggtggggcctaaagggaagtagggatcttggtaggctgcaaaattttcctccccatcccccagccacagctggcttctccaggaacctgatgacctagttacaatgcttagaaattgtcagcttagcttgcagttcagggctttgccagtctctcctctctgaggcttcttgggtccaaaaggtaccttggcatttccccaagggggttccatgtgaatgacatacactgtatcacatgtacaggcttcttgcccaggggaggaaagagccagtaaggctgctgcttcttcccttgtgtgtgccccccaaccccagggagaaaatactcccatgcccttgcccccttctgtttctctctagagggttggtgagtgacaaatgggaagtcacaaacttcttcccttgagggtcaacaaagagggccagacccttgttgccctaaggatagattgagcacacctaaccattctttccttacctccccatctcagtgtgatgttaaaacctgatggaaagaggttaggaagactcttctgggggctctggaggccccccactctctcaggcagcagctgctcctggtattcctggtgtctgccttgcctccttgggagaaattccatcgttgttaagagtcaggtacgaaatttgacaaaccgttgttgagttggtgagtctcacttgcttaatagttatccttggcaaatacttaatctttcccagccttagtttcctcatgtatggaaaagaggtaacaatatacagtgcttttcttttttccttttttttttttttttttgagacagagtttcgctcttgttgcccaggctggagtgcaatggtgccacctcggctcaccacaaccttcgcctcccaggttcaagtgattctcctgcctcagcctcccgagtagctgggattacaggcatgcgccaccacgcccagctaattttgtttttttagtagagacggggtttctccatgttgatcaggctggtctcgaactcctgacctcaggtgatctgtccgcctcagcctcccaaactgctaggattacaggtgtgagccaccatgcccggcctacagcgcttttcttgaaacactcttgagagcatgaaaatagttgaaaagatacatggagcacttaccaaggagcccagcatatagtaattacttagtataacaagctactattattactgttattgtcacattgcaatcactggtaaacaaattgttgtcattgctattggatctactctccaggagtgaactttcaggctgacagaatatgtggatatctttggaccaagagtttagagattttaaggtacctgaagcttggggccttggctcacaaccttgtcccctacctcctctacaaggcccaagtcataccttgtacacagtagaggtttggccagtgttgttgactaggcgtttggcaatggggcatattttgttttatcttcccagggtcctccttgtttgttgactgagtggaagacttaatgagttaagtatttaaagtgggtaggagcatgcctggcacacagtaggtgcttgacatgggtttgaatgattaaacatggcattgtgggaactctggagtttttccaggatggccccactcactccttgtttgctctgtggcctcaagcctcttgcccaagctctgcctgttgcctcatatgttgaagaaagataacacccgccttgcctccctcatgggctagcagggaggcccaaagagatgatagatgaaaaagcactttgagaactataaatatttggtcttgttgctactccttgactaaagtcacagccatagctgtgtcattcattcattcattcagtcaacaagcattttttgagtagaagcaatatcttatcacttaactggcttcatgaatttggacaagttacttccctctgtaaacctgaagatctataaagtggaagtaatactcatttcagagggttgttgggagaaagactaaacgaggtgctctgagcttactgaggataaaaactatgtcttattcactcttaacagctactgctgggcctagtacttggtggctgagtgtttagtgactggattaacaaacattcctaataattaatggtacatgtaaagtgcacttacacattgcctagtgcagagtaaaagctcagcaaatgctgagtctttcccttttctctatgaggcttgaggtgccttgatttagccatgggttgccttctgcagtcaaagtaccaggcaaggccagactctgaatatgactcagatgggaagtagaagtgagtattaatgcctggctccaggttgtccttacctgcctangctggacttcagtgcgggagttctgaactatcgaggatcagtgctgcttaaacataaaatccagtgtactatggttctcaccccatgcttatctctgatccagaacaactgcctcttgttctacccactctccatctgctactcagaagaatttccccttgctcacagcacccatgttcagttggagccctaggggttaccatgtcagggaagtcccagggagtcactcagaaatagcctttggggcaaggtccagagaaggagcccaattctaaggctcagtgtctcctgggactgggtcaagcagcaggtgcatacatgagacccagggctggtggctgagtgatgaaactgagagatgtgtagggccagacaagaagtcaacctagaggaaactgcctgcttgttcatgcaggtgtttggacacctgggggaactttctgggtctgatttagtggtgctagtgtaggttccatattagtatcccaagccccagtgagggaaacctttgggactcccaagcaaagcctgtagttggcacccagcacctttaaacccttctcagatccctttagggtgaaagagaggccccctcctctgggttctacagcatctacagctggaaactccagggacaatgacataataaccatagctccctttataaagtctctgctgtgtgttaggcactgtgctggggctctttatgaaaaggggatcattttgttaattggaagtatgggctctggaatcagacagagttgagtttgaatctggtctctattacatatcagctgttagattttgggtgcattcctttccatttctgagcctcagtccccctatctgaaaaatggggataataataatacttcatagggtttttgtaaggatttaagagccttttgtaagaatgtatgtaagatcatatggtgcaggtattaaggtaattttagtaatatttaacaatgagcacttgcacttaagtgttttatatgagatagttcattgaattctcaaaatagtaccactcaggtaggttctcttattattcctatagagaagttaagaaagttgttcaaagatgcacagcgagtaagtggtaaaaccatgatttgaacccaggtagtctggctccaaagccaacttgtcctacctggataaggaaggccctagtaaatgttgctgttataactattgtatccagcattgtagttgtctgtagtttttggtctatccactgaattctgagctcagtgaagactagaaacccatttaatcaccttgcacccccagagaccaacataatactcataaaactcattaatatttgcttaatggctgagaatattctctttctttagtaatcaatcagtaactctttatcgaccagttcctgtaggctagctttgaactaaatcctaggaggaatgcaaagtacagctatgcctgtgtaaacggaagattgggtgtgtgcgttgggggggtgcattccagagagcactgtgtcattggcagaaacttccacacaggaggcagaaacaatacaggtggtttgaggatgttttccaagatgggattcccacccctccctgagggagtcacttcctccatctcctgcagaacaaggtgacacagattccctactccggccaagggcaaggaaccactctaagctcttcagtcactctaatccagaaactgtgtctttatggctcaggcaaccagttcatggcagcctagaatgacagggaaaaagctgggaagggaccttagaaaatcactcttgcccaatactccagccaaagtggtcttttaaaaaccaagttcaggctgggcgcggtggctcatgcctgtaatctcagcactttgggaggccgaggtgggtggatcatcaggtcgggagttcaagaccagcctggctaaggtggtggaaaccccgtctctgctaaaaatacaaaaattagccgggtgtggtgcacgcctgtaatcccagctactcaggaggctgaggcagaagaatcgcttgaacctgggaggcataggttgcagtgagctgagatcgcgccactgcactccagcctaggtgacagggagagactccgtctcaaaaaaaaaaaaaaaaaggtttagggccgggtgcagtggctcatgcctgtaatcccagcactttgggaggccaagccgagtggatcaactaaggtcaggagttcgataccagcctgaccaatatggcgaaaccccgtctctactaaaattacaaaaattagccaggtgtggtggcgtgggcctatagtcccggctacttgggaggctgaggcaggagaatcgcttgaacctgggaggcagaggttgcaatgagccaagatcgcaccactgcactccagcctgggtgacagagcaatactcgtctcaaaaaaaaaaaaaaaacaagttcagggctgggctcagtggctcatgcctataatcccagcactttgggaggccaagacaggcgaatcacctgagatcaggagttccagaccagcctggccaacacagtgaaaccccatctctactgaaaataaaaaaattagccgggtgtggtggtgcatgactgtattctcagctactcgggaggctgaggcaggagaatcacttgaacccaggaggcggaggttgcagtgagccgagattgcaccactgcacgccagcctgggcaacagagtgagactcttgtctcaaaaaaaaaaaaaaacaaccaccaagtttaggccaggcatggtggctcacacctgtaatcccagcattttgggaggccaaagcaggtggatcacctgaggtcaggagttcgagaccagcctggccaacatgatgcaaccccgtctctactaaaaatacaaaaaattagccaggagcagtggctcacatctgtaatcccagcacattgggacaccaaggcgggtgatcacctgaggtaatgagttcgagaccagcctgaccaacgtggtaaaaccccatctctactaaaaatacaaaattagccgggcatggtggctcatgcctgtgatgccagctacctgggaggctgaggcaggagaatcacttgaacccaggaggtggaggttgcagtgagccaagattgcaccattgcactccagcctgggcaacaagagcaaaactctgtctcaaaaaatttaataaaataaaaaccaagttcagatcttattgcatttttgtttacaaccctccaagtggtcttccactgtagttagaataaaacccagacttttttttttttttttgagatggagtcttgccctgtcgcccaggctggagtgcagtaagtgtcatttcggctcactgcaacctccgcctcccgggttcaagcggttctcctgcctcaaactcctgagtagctgggattaaaggtgcccactggccgggcacgatggctcacccctgtaatcccagcactttgggaggctgaggcgggtggatcacctgaggttgggggttcgagaccagcctgaccaacatggagaaacccgtctctactaaaaatacaaaattagccaggcttggtggcacatgcctgtaatctcagctactcaggaggctgaggcaggagaatcacttgaacctgggaggcggaggttgtgttgagccaagatcgcaccattgcactccaccctgggcaacaagagcaaaactccatctcaaaaaataaaaataaaaaaataaaggcacctgccatcacgcccagctaatttttgtatttttagtagagatggggtttcaccatgatgtccaggctggtctcgaactcctgacctcgtgatctgcccacctcagcctcccaaagtgctgggattacaggtgtgatccactgcacccagcaaaacccagacttcttaccaacctctgaggcctgtgtgatctggtcctggctgcccctccatcattctgtctctcccttactccactcaagccgcatgggttccttgctgcttctggatcctggcataacttcttcctgcccaagggcctttgtagttgctcttttctctgcctgaaatgttctgcccctagtatttcctttctgaggcctacatttggttcagcttgctggtcacctcctctgagagactttccttgaccttcagtttaaagtagccatgctatttctaaatccctctccagtcttcttgtagttttgtcatagcaacagcctctacctggaattttctttttgtttgtgtacttgtttttgtctgtctcttctattagaatataagccccatgattatagggcgtttggtttgttcatcattgtatctccagtgtctgcagctgttctttgcaggtagtaaacattcagtgaatactttttgaataaattattaaacaaatgaacaaaacctaagacatgaaaaaactgaggcccagagaagagaagctaatgagaattaatagtgttctttcatcctacttttgaatgctcattaagtgccaagcactgtattcagtgatttacatgcattatttttgccacttattcttaattgttataatgagttgtttggaacatcattttttatatataccactgtaccacttaaaagaaaactggaccaatcttattttttattggaaccttgctctgttttacaaagagttggaagcaacttaggaaaattcatacaaccaaaaggataatgtagctaagggagtcgggtgaaaggaaaatatgggtaagaagacgagccaaaagtaaaattagttcacacaaatgtatgttacaaaagtcctttgaactgagcagtttttatgccattctttataactaaatattgcccagattcatttaaaatgatggttttttaaaaatctaactacaggccgggcgtggtggctcacgcctgtaatcccagcactttgggagggcaaggtgggcagatcatgaggtcaggagatcaagaccgtcttggccaacatggtgaaaccctgtctctgctaaaatacaaaaaattagccaggtgtggtggcgcgtgcctgtaatcccagctactcaggaggctgaggcaggagaatcgcttgaacccaggaggcggaggttgcagtgagctgagatcacaccactgcactccggcctggcgacagagcaagactccgtctccaaaaaaaaaaaatctaattacatagatgaccttgggattgtcccagactgcacctaatagtctaggatttgctggctcccttcctgcctcatcagctgggctcctggattgaggcaacacgatctcctctttttgccaaaggggctggtccagcagggaggagcctagacccctctccagtcctctctggacctagctaactttgtttcaaggagtcttttctgtagaaggtttattaattgagatattgccattggaaacccagttctgctctcaagatacttccagttgaattagagagaaaagacataatatacatgaaaggagatcttgtaaaagccaacaataaatgctaaatgccaaatgagggaaggacttcacagaagaggtgaggtttacaccgagccttaccacaaagcggagaaaagaggggctgtagctcccagtaggagagtcaatgtgggttaagatttgcaggctgagaccaactctcaagaagagacccgtgggcagtggcagtcaaattttaggcatatgtggaggggtctctttcattaggtaataaagccaaaaaggtcagctagaaccaggtttgtaggatcttcaagtgccagggggaggattccaaggccctccttggcagccctggtatcccaatagataggtcgtgcccagggactaatgcccatgctggccactggttgggctgctgattcccaggtggcaatggcagcttctgaaatgggagccagagccttcaactaatagtgaggggaggagttaagtgtggggccattgtcagtttagcttttggccatcccaggtgctattcatttggcgattcggcaaatgtttattgagcaccaactatgtgccaggccctgtgctacatgctgaagatgctaagataaacaagataaggtcaaggacattgctcttgtagaactcttactttaatgggagagacagctagcccgagaaacaaacaagattatttcagggattgggttaaatgctgtacagaaaatgaaactgagtaatggaatatctaggaagcaactatatgcatgggccaactcagttactcagctttgacactgttgggtctagttggtacctttgtttccttttgtgttatagatggaggtgatctttcaaatctcctctgcagagatccaatgggataatggttgactaccatttattgagcacctagcccatgtcaggtactctacatgcattttctcatttaattccctcacctagactgtgtgctaaatggtccattagccctactttcttttccagtaaagaaactaaggtttggataagtgaagttgcatgccagggtcctgcagctttacgtggtgaatcctggatttggacctagattgggctggctctaaagccaggcttctttcccctgctccactcttggaataaatgaaggattgttggttcaggatatgcagaaagctgcttagcaaaaggagagttggagaagcatcttggtttgagggtcttgaaggacacctactgtactcccagctgagaggactctttctcctcatcttcaggaggatgcctccagagcctggggttactgtaggcctttgccagaggcatgttcggacttagccagctgagtatcccctgtttcctgcttttaccatctcagctgctggtcaggaggtttgggaaggtgacatcatctagctgaatcagctgctgcttctagatacattactggaactgaaagtcattaccccttccttcctgctctgcaagtctcttcagaatgaggctggagtatgggtgttccacctgtctgcagggtcatgactggaatggtacttgctgcttttaaagagctaaaaggtttttaaaagcttgttcatggaaaaagctttcctcaaggcttctcaagctaagggaacagagcgtccttgagaggcaggaggattcacaggaaggccctccccgactccctcttgtccacctacatttagccatatgacccttctgatctcctttgcctaagtccgaggcttaggcctagcactgtaggatgggtaaacaaaacgttatttgtggactttttgaccttaagacttttagagtctggtcaaggggacaaaaaaaaactgcttacatttcagagcagaccagccaccacactattggagatatattggagatctccccttgactcactaattgaaaagcaaaaaagggcaggtgtggtggctcatgcctgtaatctgagcactttaggaggctgaggcaggcagattgcttgagcttaggagtttgagaccagcctgggcaacatggcgaaactctgtctctacaaaaaaatacaaaaattagccgggtgtggtgtttcgcacctgtattcccagctactcgggaggctgagatgggagaaacacttgagtccaggaggtcaaggttgcagtgagccatgttcacaccactataccccagcctaggtgacaaagcgagaccgtctccaaaaaaaaaaagaaggaaaatcgactgggtccagtagctcatgcctgtaatcccaaaactttgggagtctgaggtgggaggatcacttgagcccaggaattcaacatcagcctgagcagtacagtgagacctccatctctacaaaaaatttgtcaggcatggtggcacatgccaataatcttggctactcaggaggctaaggtgggaggatcacttgagcctgggagttcatggctgcagtgagctatgaacacatctcacagaactccaacctgggcgacagagcaaaatcctgtctcagaaaaaagagtcattggagggttttgaaccaagaaatgacagtccgacatacatttttaaaggatcaccaggctgggcacgatggttcacgcctgtcatcccagcactttgggaggccgaggcaggcagatcacttgaggtcagaagtttaagactagcctggccaacatggtgaaaccccatctctactaaaaatacaaaaattagccaggcatgatggcgtgtgcctatcatcccagttactcaggaggctgaggcaggaaaactgcttgagcccgggaggtggagattgcagtgagctgagattgtgccactgcactccagcctgggcaacaaagcgagactccgtctcaaaaaaaaaaaaacagcaacagcacatgctgaggattctgttcagtggtttccacttatcagtatagcacctcattaatcctcccaacagttttatgaggtatgctctagtggtatccacattctacagagaagaaaactgagactttgagaggtaaagtcacctgttaggccgggcacagtggctcacgcctgtaatcccagcactttgggaggatgaggtgggcagatcatgaggtcaggagtttgagaccatcctggctaacacggtgaaaccccgtctctactaaaaatacaaaaaattagccgggcgtggtggcgggcacctgcagtcccagctacttgggaggctaaggcaggagaatggcatgaacccgggaggtggaggttgcagtgagtcaagatcgtgccactgcactccagcctgggtgacagagcgagactccgtctaaaaaaaaaaaaaagaaagtcacctgttaaagattacacagcaaactgccagcatccaaagcctgtcctcttccctcttccatttgaataggctccttccagccaacattcatgtatattctatccaggctccaaagtccagtaccaagccagtcttttccaggaagccttccccaagcttatctaatggcctgtccctctattgagagctgatctacagagctaccatccattgagcactccatgggtgctaagtatactgctgaatgatttaaatatgttatctcatgtaatattccaaggagccatatgccctgtgacatccattttacatgtgaaaatagtgaagctaaaatataggcacatgccatcatgcctagctaattttttttttttttttttttttgagatagagtcttgctctgttgcccaggctggagtggcttgatctcggctcactgcagcctccgcctcctggattcaagtgattctcctgcctcagcctcccgagtagctgggattacagtcacccaccaccatgcccagctaatttttgtatttttggtagagacagagtttgaccacgttggccaggctcgtctcgaactcctgacctcagatgatccacccgcctcggcttcccaaagtgctaggattacaggtgtgagccaccacacccggccgactagcttatttttaaatttttagtagagacaaggtctcactgtgttgtccagactggtctctaactcctgggctcaagcagtcctcccaccttgacgtcccaaagtgctgcgattacaggcgttagccagcagtgtctggcctctaatgacactttattcatgagaataaatgccaaaatgtatacagtgcatgggcatatgactgggagaccttggtacgccagcagtggcaaggacagtcacctagaagtaagtgccctagagtacaccgaacctgggtttcaactgcccaggcttactccttctcaaaaccagcccttttccagctttgtgtccctgtgtgtttgcatgggtgcaggcacaagtagatgacacagtggtgatgctatgcacccaggacatttcataatagggaaggacgttgaccgctgccatggggtaccaaaggtcatcagggctgtgaaagccaaggacactcaggcagccttactcccctttgagtctgagtcatttcctgagggatattggtcattcattcatttgttcattaacaagtatttattgcattcctgtcatatatcagggactgagctaaaggttggacatacagtctgaacgaaccaaagtccctattctcacccagtggacattccaaggtgggtgacagattttaagtaaattaacatgtcagggctaggcatggtggctctcgcctttaattctagcactttgggaagctgaagtgggagtattgcttgagcccaggagttcgagaccaacctgggcaacatagtgacaacccacctctaaaaaataaataacatgtgaggtagtatttagtgatatagggaaaaataaagcagagaaaagggattagggatgggaaaaggaagggtagggtagttaggaaggcctctctgataaagtgacattggatctgaatgcagtgagggcatgagctgtgcggatatatgggggaatagtgttgtaggcatagagaacagcaagccgtaaaacaaaaaaaagccagatgcagtggctcacgcctataatcccaacactttgggaggccaaggcaggaggatcacttgatgctgagagtttgagatcagccagagcgacaaagccagagtttagttgggcatagtggtgcatgtctgtagtcctagctagctactcgggacactgaggcaggaagatggcttaaatccaggagtttgaggctgcagtgagctatgatcctgtccctccactctagtctggctgacagagcaagaccttgtttcaaaaaaattaaaaaataaagcaagtacaaaaaaagactctccaacatatttaaagtacagcaagttggccagtatggccagagtagagtaagccagtggtaggaatcaggtctgagacgtcaccaggggccaggtcttgtagggccacatgggaccttgctttaagggcagtggaaaggcatggaggatttttaagcaaagaagtgacaggttttagaaggatctctctgatgtggagaacaaactctatgggtaagagcgggagcaggagaccagtgagaagccaggtgggtgataacagcagtttataccagggtggatgggtggtggaagtggcgagcagtggtcagagcttcaatacaatttgaaggttggaccaactggatttgctgatgtttgctggataagaggtgagagagaaaggagtccaggtttttggcttaagaaactggaaagtccttactgccatttaataaggggaagatgccttggctgatagtgatttcctgctagggctgtggagttgaactgcctgcattcaagtcctagtttgcttactgttttgtttttgttgttgttttgagatgaggtctcactatgttgcctgtgcttgtctcgaactcctgggctcaagtgatcctcccgcctctatcttcctgggattataggtacgccaccaggccctgcttactgtttgactttgagcaagtgtttgactttgccaagccttagtttccttcaatgtaagcctactgtctagatgataggcagttgggtgctgtgaaaactaaatgagggtaatttgtatgaagggcttaggacaatgcctggcatatggtaaaccttcagtaagagttagctctaatccttattactattgttggaagacaagaagtcccagggcctcaaggtcctctggaaagcaggcagcaggtcacactccacctccaccaccccctcaaggagcccgccctccaagaggcagctcagacaccatctgtccagcagagaaaagccacagggagacagctttcggggagcattagatagatgagcccttcccangaaacctaatctcattctcagcaggtgctaatcccaccaccctcccttggtatctgagcccagcccacccacttccttccccacccccatcctgtgtcctagaccctcttccccttctcaccagctccaagctgccaccagcaaacttccttaccagatggaggggctctgacagaagcccaccacccatctgactgggcccagcctctcacatgtatcaggtcaccaagggctacaggtgccacctgtccagaagccccccctacaggtgccagttcctgggcgtggtgcttgatccaggctggagccagctggagccaggaactcccactgtgccccagctgctgcctgccctcccacccacaggcagagaaacaggcttaacccttcggacactgcatatgttgagttagttgttacagttctggctcagagtattgcactgtttcagtacactttttttttttaaagaaatttatcataaatacaacagagaatatctaatgcatatgtacaattttaaaaataggaaaatcatcacttgtaaactcatcacccagattaattaataatcaaacatatgtttgccttgcatgatggcttatgcctgtaatcccagcacttgggaggctgaggtaggaggaatgcttgaggccagaagtttgagactagcctgggcaacatagtgagaccaccatctctacaaaaactaaaattaaaaaatagctgggcgtggtggtgcacgcctataactccagctactcagaaggttgagtcggggatcacctgagcccaggagtttaaggctgcagtaagctatgatcgcgccactgttctccagtgtgggcaacagagggagaccttgtctctaaaaacaaacaaaaataaacgtgagtaccttagagccccctgtgtaccccctccccaatcacagctaccccaccatccatactcctgagttctgtgttttcttttgtgatatcttaccatgtcaaccaggctagagtgcagtggcatgatcatacctcacttcagcctcaaacctctgggctcaagtgatcctcctgcctcagcctgccaagtagctaattttttaattattattattattttttttagagatgggatctcactatgttgcctgggctggtctagaactcctggcttcaagcgatcctcctacctcagcttctcaaagcactgggattacaggtgtgagccaccacacctggctacctttttttttttttttttttaagttttactatatatatataggtatatattcctaaacaatataggatattcttctacatgcttttttttgtttttgtttttgttttttttttttgagacggtcccactttctcgcccaggctggagtgctatggtgcgacctcagctcactgcaacctccgcctcctgggttcaagcggttcttctgcctcagtctcccgagtagctggactacaggcgcacgccaccacacctgactaattttttttttttaagaccgagtctcactctgtcgcccaggctgtagtgcagtgtggtgcgatcttggcttactgcaacctctgccacccgggttaaagtgattctcttgcctcagactccctagtagatgggattacaggcacctgccactgcgcctggctaatttttgtagttttagtagagatggggtttcaccatcttggccaggctggtcttgaactcctgacctcgtgatccaccagcctcggcctcccaaagtgctgagattacagctgtgagccacggcgcccagccctaagttttgtattattagtagagatggggtttcaccacattggccaggctggtctcaaactcctgacctcgtgatctgcctgcctcagcctcccaaagtgctgggattacaggcgtgagccactgcgcccagcctgtgcattcttttaaacttcatttaggtattatgctgtgtttatcatctgcagtttccttttttcattcaaggttgagatccatccatgttacttgcatagcataatttgttcattttcgtatccatttatatgatcatgtctcaagctgtgtatccattctgctgtcagtggttatttgggttgtccccttgtttttgctgtttcagacaatgctgttatgaaaactgtttgtgtctcctgcacatgcacatgttcaagagtttctcccaggcagtggttcccaaactttagctgcccatcagaatcacctggaaggtttgttaaacctcagattgctgggctccacccccaaagtgtttgattgtgtatgtcagggttggggccctcagaatttgcacttctaacaacttctcagctgatgctgccactcttggtcctgggacctcactgagaatcattgttgtagggtttacacagaagtggaattgcttgatcagaaggtaatggcagattgttttcctgtgtttgtgtgaatttacacagccaccaacagcatatgggttttccattactttacctctttgttaatacttgatatggtcagacttaaatttttatggagctggtgggtgtgagatggtatcttgcggttttaatttgcatttctcagattacaagtggggctgtgaatcttttcttacatctgttggccattcatgtttcctctttgtaaaatgttcaagtccttgctccatttccttttgatttgactttttcttatgggtttgtaggcttttaaaatgtattttgaatactaatactttgtctatgcatgttacaaatatagtctttcagttcttctgcctcagcctcttgagtagctgggattaatttgttcgccgggcgccaccacacccagcctgtttattttattttattttattttattttattttattttattttattttttattttgagatagagtctcgctctgtcgcccaggctggagtacagtggcacggtcttggctcattgcaacctccgcctcccaggttcaaatgattctcctgcctcagcctttcaagaagctggaattacaggcatgcactaccacacccagctaatttttgtatttttagtagagacggagtttcaacatgttggccaggctggtctccaactcctgacctcaagtgagcctccatgcctggcctccatagggtgttaaaggctgtaaatttgaattatttatgacttaagttatacctagagcttattgtatatactgtattaatatttcttttttttttttttttttttttttttttttttttttgagacagagtctcgccctgttgcccaggctggagtgcaatggcatgatctcggctcactgcaacctctgcctcccgggttcaagcgattctcctgcctcagcctcccaagttagctgggattacaggcatatgtcaccatgcctggctaattttttttatatttttagtagagacggggtttcaccatgttggccaggctggtctcaaatgcctgacctcaggtgagccacccacctcggcctcccaaagtgctgggattacaggcctgagccaccgtgcctggcctactgtattaatatctcataatgaacaaaggtaccctctttgggaaaaagttggggctttttttccttttttcttttttaacttttcaattgattctcaaagccagcatgtgggagagagtttatcaaaacagccaggcatcatggcgcacgcctgtaatcccagctccttgggaagctgagacatgagaattgcttgaacccaggagacggaggttgcagtgagctgagatcatgccattgcattccagcctgggcaacagagtgagactctgtctgcaaaaaaaaaaaaaatacatactgacctgtgtgtgggatttgcttcaaaatactactggagtgagagatagtggttggggaacagatgaaatcagattggcaccaagttggtacttgttgaagttgaatgatgggttcgttttattctgtctacttttgtacatgattaaatattatcataagaataagtttaaaattggccaggtgcagtgactcacacctgtaatcccagcagtttgggaggctgaggtggaaggatggcttgagcccaggagttggagaccagcctggacaacatagtgagaccctgtgtctctcaaaaaaaaaaaattagtcatttgcagtggtacacacctgtagtcctagcttcctagctacttgggaagctaaaataggagaatctcttcagtccgggaggttgaagctgcactgagtcatgattatgccactgcactccagcctggatgagagtgagaccctgtcacagggggaaaaaaaaagttaaaaatatccaaggactatttccagggctacttgtgaggtagcacatcttttctttttttcttttttgagacagagtttcgctcttgttgcccaggctggagtgcaatagcgcgatctccagctcaccgcaacctccgcctcctgggttcaagcaattctcctgcctcagcctcccgagcagctgggattacaggcatgtgccaccacacccagctaattttttgtatttttagcagagacaggatttctccatgttggtcagggtggtcttgaactcccaacctcaagtgatccgcccgcctcagcctcccaaagtgctgggattacaggcgtgcgccaccgcgcctggcagaacatcttttcttaacgttttgttagccatttgtattcttcagagccaatttagtctccatctactttcaggagttcctgataaagtggtcttagcaggcatggaagagactgattttaaagaaaacaggagagggagtggtaaggaaagactggggaggggattttcaggcggttgccagcccttctcctagagcctgactactactgcctctaggattaagtttcctaccttcccttgtttcttccaggaccaccatgggataatttttattttctttctttctttttttttttcttttttttgtagagacgggatctcactatgtctcccaggctggtttcgaactcctggtctcaagcaatccacccgcctcagcctcctgaagtgttagtaggattacaggcataagccactgcacccagctgtctttcttccttccctcccctcccctgccctccccctccccttccctccctttcccttcccctttcttcctttccttttcttctttaattatagagacagggtcttgccacgttgcccaggctagtcctgaactcctggcctcaagcagtcctcctgcctcggcttcccaaagtgctgagattacaggcatgagccactgtgtccagccaatttttattttaatggtattcttctttccctattattttacctggacagacttaacccagaggatagaggaacctcatcatggatcctggtccgcttttagcttaacagcatccaaagacaaagggtcagagatggtagcaaccctagtgtggttgattacacagtagtggtgttattttgttgtcataggatgcaaatatcaaagttgtatctcttaagatctttctgtgtcagtacataaaagctttctcagtctttttaatgctgcatagtattctacacagggcactattctatactttaaccagttcccattggtagacacatttttttccagtcttttgcagttataatagtgacactcaatgaatagccctgtatatttgtcatttggcccatatatgaatacagtatatctgggggggatgaatccctaaaagtggaattactggggccaagggtatgtgtacttgggattttaatagggttagttagcctgggcccacagcagtgggtaccagtttacaggagaatcttttttcttaacacccttccacccaagtggagagtttggttcagcacatttctttttctttttctttcttttcttttcttttctttttcttttctttcttttttttttttttttggagacagagtcttgctctgtcacccaggctggaatgcagtggcacgatcttggctcactgcaacctccacctcctgggtttaagcagttcttctgcctcagcctcccaagtagctgggactacaggtgcccaccaccttgctgggctaatttttgtatttttagtagagacagggttttgctatgttcgccaggctggtctcaaactccagacttcaggtgatccacccacctcagcctatcaaattgctgggatttacaggtgtgagccaccgcgccggccatcagcacatttcttgagtgccttcctgtacctggccctggatataagataaacacttncatgtatcaagtgaaattgttactatttgccaggcaccagcacattatctgataatcctcataactactcaaagaggaaggcttttagatgagataagtgaagctcagaagggttaaatagggtgccatggtcatggtccagctattaagtggcagagctaggattaagcccaggtttcaatcctctgatgcctgtgctcttacagtacacctttacctgcctctcaggaggaagaacatatggtcttattgtctaatacagataaggaatcaggctcagagagggtaactggccacaaaacagccagcctggaagctatgaggaacccacatatgtctgatcagaggtctctggtctacactgagctgcctgcctccctcccggggaaagagtttgagaattttcttttttttttttttttttttgagacagagtctctttctgtcgccaagctggaggagtggagtggcaatcttggctcactgcaacctccgactcccgggttcaagcgattctcctgcctcagcctcctgagtagctgggattacaggcgcgtgccaccacacccggctatttttttttgtatttttagtagagaaggggtttcaccgtgtttgccagaatggtctcgatctcctgacctcgttatcctcctgcgttatcctccttcctttgggaggccgacgcctcccaaagtgctgggattacaggcgtgagccaccgcgcccgaccgagaattttctccgttcagagcttcacttgctatagagagcctcaagtcactggttctcagtgtgcatctattggccatcagagggtcctttagggatgacccatctgtgcttaatttactaatgacagtatagttgctgctatttattgagtgcctgccatgtgcaagatgctgtaaggtacagtgtagtttgttttgttttgttttgtttttgtagagatggaggtcttgttgtcttgaccaggttggtctcaaactcctgacttcatatgatcctccctcctggacctcccaaagttctgggattacaggtgtgagccaccagactcggccagtgtagtatttttaatcttcacaataatccttcttgggaaacatgttattgtcctcattgtccagattagaaaactgagtgtaaagtaagttaaattatagtcctaaggttgaatgctaataaagacagaatacaagtccaatatattggactcaaaagccctcacttaactatggtctccatgggcttcccttggctctctctgcctttttttattttttcttattgcttgaggccctttctggaaggtaagtctggattatctacttcacactgttttagagaagacttgtggtttccatttaccccttactccctccgctccatggcctttcagggagaacactgtgggtatcatgctgggtggcctggagggtccaagtaacaggaatctagaaggatggaccagatgtgaacaaaagaaagcctgagtaggacacaaaacagagaagtggggctgtaacatctctaagatattacagcttgctacttccactctctttgcaaatgtggtgaaacccaggctggagtcataaaataatagcataggatcattaactaaagtttgtctagtgcttccttgtgttcacacattatctcattgaacctctgacgatgctaggaggaggtaaatagggttttcctcttaccttgggtgaactgaggtcttctgactaagtctcaggtcctttctaccatttgtgctgcatccacatctctactgggaagaacacaggctctgcagtcagacacacctgggtttgaaccacctccattttgtgtgtgttggatcttgagcaagtgaattcacctttgtgaccatccatgtcttcataaaataagaattttaaacacacatgagggcctggcatatacaaaacattgaataaatagcagtgatctttttattgacatcagaagggggttggggacccagaggctatttgggctcctatggcatagctcttggaacgtgttaattttcaaggacaggggtttgcaagtcagagcaatgtcaagtaaagaacaggttctttgggaggccaggatatgctaatgggtgaacaatgtaagggaggcataataataatgccaaaggcctcctagagtacctgttcactgcacttttgggtctttggtttatatatgaagaaaatgaggtgcccccagaggggaagtgggttgccattgttacacagtaagttaataaatggcattgctgagattagaactcagtcttttgtctgccaagaaagcttacttttcccttacactccactgctcccttgaggggaaaaaaaaagggcccggagataggatcttagtgctttggaactggagagaaagccttagagatcatctgatccatcctccacacttttcagatgagaaaagtgaggcccgtggtgcttaattgacaggaccatagccaaatagagccaccacaaagcaggagtaagctcacgtttcttgaacctgaccatgtggaactttcaaattgccttttttctgtgcggaactagagcctcactgaaaataccagtggtttacaataagaacagctgtttagtttggggaacatttttccaaatagaatcttctttttctctctttctcaattctttttttttttttgagatggagtcttgctctgtcactcaggctggagtgcagtggcacgatctcagctcactgcaagctccgcctcctgggttcacgccattctcctgcctaagcctcccgagtaggtgggactacagacacccgccaccacgcctggctaattttttgtatttttagtagacggggtttcaccgtgttagccaggatggtcttgatctcctgacttcgtgatccacccacctcggcttcccaaagtgctgggattacaggcgtgagccaccacgcctggctgtctttctcaattcttaataaaaatatactagaagaagaaaaagctttaatggaggaccttggtagaaagcaggtaaaaattatatagagtctctaaaatctagggaggtccccagagccagtaaatttagaggccagccttctcgcctatcccagcaagcttatcacttgtcttgccctattcacaacaggccttcagaaggcccagccttcccttggcagctgcatgtggtgaacaccaacggaaatccctggtatttttctttgtatgcaaccaaccgtggagatgtaggtcaggcattgctggcttggcagttacaacatctctagcttcacccctgcacctgtagccgtgttcactaagcccctcaaagatgggaaatggatggtcccttcttaatagggtttggatccccgagggctcatatgggtggagtgggtttgggaggagacagaccatccggaatgtggagatgagaagggtagatctggctcttccctccttaatgtctgatgtctggtgttactatagctggattggtggtgcttctgctcagctcaccttagagtaatcatcactgacggaggagactggggaggtcccatccttcccctgggctcagctgggtccccagacctacacctgaaccccacgcctgtctggtgtttacggattgaagctgccaccctttgggacctatcctgttttcatttctgctctcagctctctggtctctgtggacctcacttacaggtttgtacgtgcctgtcacccacggtgcagccccatgaggctctcccagcctggcacactcatgcctctttggcctttgttctcttcaggaaaactgctagctctatgccttgctagggagggcttttctggcccctcagataggttcttttggtccaacctagctatacctttcctgagattcagtctctttgtccacaccctgggggacagggctgtggttccaaggcatgttggggggtacctgtgggccattctggactggcttccggtcagctggctgactctgccctgggtctcaaatatctcctctgtaaaggtgttagaccaggatcttcaaggtaacttagaggtgatatgcagatggacattttctgttttaatagtcagtgtattttatgttgatttccatctggggcaaatgatactctttataggaagaataataagttgccttttcattgcatttatttatttagcaaatatttgctaagtgtctactatctgtcaaccactattctagctactggggatacctgccttcatgaagttcacattcttttttttttttttttttttttttttttttttttttttgagatggagtttcactcttgttgcccaggctggagtgcagtggcgcagcctcggctcactgcaacctctgactcccgggttcaagcgattcttttgcctcagcctcttgagtagctgggattacaggtgcccgccaccacacccagctaatttttgtatttttagtagagacggggtttcactgtgttggccaggctggtcttgaactcctgatctcaggtgatccacctgcctcgttctcccagagtgctgggattacaggcgtgagccactgcgccgggccatcatgaagtttacattctaagaggacagagagtgattaggtggccggtggtaggcagcttttggtatgtgtttgcctttttaataaaggataattaaggaaggcctctgaggagcaggcatatgagcagagatctgcatgatctgtctgagggaggaaaccatgtaacagtctatggaaaaaacattccagacataaggaacaagtgcagaggccaaagggtgggaatggtgtgcctggcatgtttgaggaagagcacgggagatcagtgtggctagaacagagtaagcagaggagaagtgattggaaaggaaagtttgtgtgagcagtggtgagacattttggttcttcctctgggtgagatgggaaggcagtggagggttttgagcagacaggaaactgactttgctgacccctctggctgccatgtggtgaaggaaccatggagtcgataagaagctgggagaccagtaaggaggctgttaggacaatacaggcaagaaatgatactggcttgnaccaaataatagcagtggaggtggtgggaaatggtgggactctagataaatttggaatacagattcatcaggatatattgacagatgagtgttagaggggatttaaggatgagaaagatgcagaaagaacaggtttagggaataaattgagaattttcagtacatgtatttaaatttataaaaagtaagtaaattgatagaataatgttaagtaggccaggcacagtggctcacagctataatcccagcactttggggggccaaggcgagagaatagcttgagctcagtagttcaggaccagactgggcaacatagtgagaccttatctctacaaaaaaagaaaaagaaaaaaaaattagccaggcatggtgatgcacacctgtagtcccacctagtcgggaggctgaggcaggaggattgcttgagcctgggaggttgaggcctcagtgagccttgatcacacgattgcactctagcctgggcaacagagtgagaccctgtcttgaaaagaaaaatgttaagtaaataataacagaatcacatataaggtcaaagcagtgatggctgaaattgtggatagagtggaccaaatgtgtctgtgctgccttccagctctaaaatcctgcttcagtgattcagaccacatagtctcccattcacagagaacaagaacttgaagctcagcctagaataagcagataaagtgacaggagagcaatcctttggaccaggcctacctcctgttaatttggaaggacttgggaagttcttgcacatatactggccttctggcattaccttatttatttattcattcattcactcagtcagtcagtcagtcactgagcaccttctgcctagtaggccctggacaacggcagctctgatgcttcttctctcctaatataaagcaagctaccctgacccccgctcccactggagcctgtctactctgtggcctggcatatgcctggcggtaatgtgtgtgctgaaagtggaatagccacagcctaggcagagccctgccctccctttgctgcactgtctctgtccatctctgccttcctcatcttattgccatccacactttgaggcctggtgagcaaatgattttgcttccatgagagcagcagaaatagttgctttatctctttcttcatataggtcctcatagttatcaaactggaaagaaatccccaagggcctcttctctcgccttttatagatgggaaacagagggccaagagggcaggcaactcccacagtccacatctaattcatcagcaaatcctttcagctctacttttattgattgattgattgattaagaacagtatcttgctgtgtcttccaggctgaagtgcagtggcgcagtcatggctcactgcagcctcagcctcctgggctccagcagtcctcccacctcagcctccggaatagctggaacatgccatcacgcctggctactttgtgtcatttttttgtaaaaataggattttcccatgttgcccagactggtctgaaacttttggactcaagcagtcctctcacctcggcctcccaagtgctgggattgtagacatgagccgctacacctggcccagccttactttaaaaaataaattctgaaactgactgcttctcaccaacttccctggcaccattgtggctaagccactgtcatattttcctgattatctcaccagacccctggagatctccacccagcagccagacggacgctatttaacaccaaggtcaggtcatgtccttcccctgctcaaaaccctacagtgctttcccaggacaagcccaagtctttaaatggcctaccaggccccacacaatcgggcccttggctacctccagatctcatcaccaccagtctcctcacattcactggacttcagccacactggcatttttcctgttcctggagcacctcaagcgtgttcctgcctctgggcctttgcacttgttcccacagccttttctcagatctttgcagtgcctgtttcctcatttcattcaggtctctgatcaaattcacctccttaagaagttgtccctgaccatggattctaatcttaccttcttccatgtttctctgtaccccctttctcacatttattctttcttaatgcatcaccgtctgacatgtttattgcctgtctcttcccatttgattataaactcatacaggtacgaattttcattctatttagtcactgctttatccccagcgcttagtacagtgcctgactcttagtgggcacttaatgaagatttgttgaatgactgagtgtccaaagctagggaaggcagcctgtctgggccttcctacaactccataggtcagcctggcttacaaataggtcatgtcccatcttagaaaactcatctaatagcttcaccaaagctacgtggcatcacttttgtttccaagataaagatcagacagagggaggaactctctctgcaagtactgtccttgcagatctggcttaggggaaagtgggttcatcactgagtagcctcagcacactcttccctttctcacccctcaaggcacccagggaaccaggggggaatgctacttccatgtacttaaagtcatctctgacttcgaaggcctaagaatagcagattctcagtaaatattgggtaggtgaaagggtgaaggaaagaaggtcttagtaaaatctcttcatgtatcctgttgcactggtaaatttaacatgctgtgaagttgaatgccctcactagtaaccaggggcctcaggcaaagtctcatcacttcgctgaattttagtttcctcattggtaaaatgggaacagcacctacttgcaagattttgagaattcaaacagtaaatattagttcagcaaatactagctgttactttttgtttgtttatagctacaaataagagagacactatgagaagcacaaatggagccactgattttttagctataaaaaaacaggctgggtgcagtggctcatgcctataatcccagcactttgggaggctgaggcaggcagatcacttgaggccaggagtacgagaccagcctggccaacatagcgaaaccccatttccactaaaaatacaaaaattagcctgcaaaaatacaaaaattagtgtggtggcacatgcctataatcccagctactcaggaggctgaggcacaagaatcgcttgaacccaggaggcagaggttgcagtgagcagagatcacaccactgcactccagcctgggcgacagagacagagtgagacttcgtctcaattaataacgataataataacaacagcagcagcagcagctaacatttacagaacgcttaccatggaccattgaactctgctgctaggcctgtgaagtaagtacagctgttttcattttgcagccggaacaccaggcttggagggggaaagtgtcttgctccaggtcctgcaaccaggtagtcacagaactagggttggaagccacactgtctcactccagggtagggaggcctgagaccaggctgtgctctgtccctgtatgaagccttggaggtatcccttcacttcctctgggcctcagtttcttacctgctcaggatcgaaccacacatctctgtgacgctctgaaatttctggtggtccacaggccacatcaagtgggacagtgagttgcttccaggcctcctggtggtggtgctctgggtattgactgtgaacagcacacctctgggtgccccctccctcgacatcaggcaaagtaccctagccctcttctcaccatctcaggcatcttactgttctgcaccttaaaggggtaatggactggggcagaaatgaatagggtagaaaacaagaaggaacccactcccttgtctggtgcagatcaatgttggatgctgcagagaagagtatgaggctgacagtcagtggatgtgggttttgtttcccagttccatcacatcacagaatagaaggaaatgcaacaccgtgggtgccttcagccctgagtttttggttacatggggtgtgagcattcatctgtacagtggggagagaagggtgttgcagggatttgctcccttccccaaatcctccagagctgttgccttctgctgtggaattccaaacatttctgatcagataaaggtggctgaaaatacttgggacttgtctggactagttggaggcggtgctggggtgaagaggtcgaggccacaggagctagagcgtggaaagatctagccttgcccaggagtctgcctggtcatagatgtgcctattgctctcttcccctggaatcctgcaggttcagagcaatgcccagcgggctttgaggtggagaaggatcagactcctttgtggcaacaagttctcctacttcagaatgttgcttctcaatttacacactaattactggatcttttggatacccctgagagagagaaccctggtagtcactcatctgtctgcatgagttactttcattctccttatgctgtagccctagacggagccctttgagatgattcccacttcatttgacagttggggaaaggcccatactttcccagagtctcaggcaggggaaaggactcacctgcaaatcagcgatggaactgggaaacaaaatccacatccactgactgtcagcccagtactctcttccccacagcatccagcactgatctgcatcagacaagggagtcgccatagctttgggtggagaggaggaaggagaagctgctttggactatggagcacttggggtcaaagacctcagaaagaagtcctagtttttggagattgctaccccattcctgcctgttgcctcagcacagtgcaaaagatgccttttctagaactttcccataagcttcctgtcccctttccttatcctgagagaaagtgtctggagaatactggacaccttgcataatcacctgctatattggggcctctttctagttttgccaggcagtgaggaaagggatgaagagagtgggaactggcctttcttctcttccctcctctctgtccaacactcagccagactcttcagcaccttctctggacccagcactgggcaaggcctaggggacagagcccatggtcagatgggggaagaagtgagcagctaggctccttgagaaagtgacctgtggattaagacctcagagataagtgggacagagcttggtagaagcaccagtgtgggcaaaggtcctgagtctgaacagaacatggcatgtgaggaatgaagcagcctggccctaggtgaagctgagaaaaccctgcaggcccttgtaagccatagagaaggctccgagacacaagctgagccatggtctactagtaagaacaataaaccagacatttactcaaagttaactatgtgccatgcacaattctaagacctttacatgtattaatttgaatcctcatggtattcttttgaaataaggacattttgggccagatgcagtggctgacgcctgtaatctcagcactttggggggccgaggtgggtggatcatttgaggtcaggagtttgagaccagcctgaccaacatggtgaaatccagtctctactaaaaatacaaaaaaattagccaggcatggtggtgcatgcctgtagtcccaattacttgggaggctgaggcagaagaatcacttgaacgtgggaggcagaggttgcagtgagccaagattgtgccactgcactccagcctgggcgacagagtgagactctgtctcaaaaaaaaaaaaaaaaattaaataaggatttttttaatccgcattttacagatgaggtcaaaagcaaaatatcttaatctagtttgcaagacttattggttctctgcctgctctgtgctctggcagcccagcttggtagagaagtagaaattaattgcctttatccagatagcacttccatttcacaaatgagacaactgatacttggaggagagcaggagagcagcagcggagagagagcagaactaagaccagccagtcaagggagacagagggagacgagcatcagctccctgacagggaagagttttccaacggggctgtccgaagatgaaatgtcccacccaggaaggagggagctctccataagtgcataaggagagaatgccctcgagatgactaccaactcccatgggtgtggaccatcagaatgaaacagacccactgtgggacttcagcactccacccttctgaaccctgtctgtgaaatgggggtgttcgtggtgagcttgagtattacatggaaggttggatgggcatgctgtaaggtccctggagtctccgactctgttccaagggtgagtattggtttttctcaccctggacactgggagaagaatggagggctgtggccatctacttacgaaagaatagggagtcaccagggttgaaatgagagagttgagatgacgggaggcatcggaatcccaggggatgagcctatatgagcacatagcagccacccaggaacagttaaatgtttggactctggagacagactgcctgtattcaaatcccaactctaccacttgtggcctctgtgaccttgggagggtgatttatcctctctgcctctgtttcctcatctgtaagctggagagtaataacagcatgtactcggtgggattattgtgaggattaagcaaattctttacacacgaagcacttagcaccatgcctggtacttagtaaacatcagctgttttatctccatcggttccagggaaggaggttatgagcccccaaatgagcatctctgcccccagtaaatgcttttctgaattctctctctttgcccccaagcccatcaccctggttctgagccagagagatggagagcccacactcgcactgctaggcctgatagctttctcgattccccagcggaggtgttatctcctcccggcacaaccgcttccttttctgagaaatgcaagtgcatctgtcaggcacagcttcttagaactaatggtgggggaggaggtggaggaggagaggctggcagctgaattgaacaggtcagagttggaggaagataaacatgaagtttgttgtgaggataccaccaaatattccctatagcccagatggcttgagccctctatgacaccccctgatctcaccactactgctagggaggtcaaggcaggagaaactgaggctcagaagccaaaaggcttgctgtggcacccacccatacctgggccggctggactgaggtgttgaccccaacacagtcttgccacccctctctttgccctgcctccactgagctgcttctccaagttgcccacctccaggcctatgtttccgtgggggagaggagaaaggccatgttcttctcacatctcgggagccaacagctcccctgggaaaaccagaggaagtggattccaaccacaaacctcacttcttccgagtctccgcctgcaactccctgccaaaagagtgataaggcctctccgtttgccctacccccttcctaccatctcccagcgatcttctagcaaggccatgtttgtctattcagcacacatttatcagcctctccctcagggaaactgaggccaggagcataaggtgactctgcaggtgactcacagcctgccaatgcagggatgtgagaaggacagaacaaggtacagttctggtgtccctggcacttttcctggctgctagtagcctcttcctcttctccacctacctctttcctgaaataaccaagcaggaaggaagcaatgggcctgggccctccagagtcacccaagaggaaggaagggttcgtctggcacaggcatgcttgttcctcactgaagccaggacggaagggtttcactttccctcctggtcttcgtcacatccttttcctgtggcaccagttcccctcagctggcaggagccagtgcttattcattcagctgatggcctcaggctactttaccctccttgacagacccagggccatggccctggctcagaatatggggtttgctgccaaacatactggggcttaaaaatggcttccctttttttttttttttttttgagacggggtctcattctgtcgccctggctggagtgcagtggtgctgtcacagctcactgcagtttcaacctcccagcctcaagcaattctcccacttcagtctcctgagtagctgggactataggtgcatgccaacacactcagctaaatttctaagatttttcttatagagatgggggtcccaccatattgccctggctggtctcgaactcctgagctcaaacagtctgcccaccttgaactctcaaagatgctgggattacaggtgtgagccatcacagctagctgccacttatccactttagctaggtctcagtatctctgagcctcaggttacctggacttagaatgaaggccttcctcagccacagaagtacatggacctggcccatgattgtcctttagaaactgagcagagtactgcatcaacgttaggagtaaaggcactgaaccagattgctggtgtaggcatcccagttaggtcaccagctcactacatggccttgagcaattcacagatcatctgtgggccacatatccatcagctatatgggttaatggtagtacccactgacagagtgtagagacaactaatgaactaatctacaaaaaaaccaagaagagtaccttacagagtatgtgctcaggaagtgtgcgctgctgctgaagtcactaaggaagtcaggttttctgtgggtagagatagcagggtctaagatggcaagattggacatcagaatgagtgtgaatgaagtactatcttggatagattaaaagaaaaagaatggtgtgaggccagaactcagacagatcctactcttgccacttcctagatagggatcttgggtaaattctggagcctccattttcacatatgtaaaatggggctattgataaatgttatgaggatcaaatgaaagcattcatttgttcttctaaaatagatttatttagaatggcatctgctgtgttccaagtatagcacaccaggttctagagatacaggtgacagagccacacacagtcaagtgggggagacaggacaaaaaataatctctcaagtgaatatgatgattgtacatgtaattgggaaatatggcctagtgtgcatagantgctttatagctcagtgcccagcacaggtgaaacactgaaatgtttggtaatggtcagctgtcataataatagttttttgtttctttgcttttatcttttgtttttttgagacagggtctcactctgttgcccaggctggagtacagtggccccaaacatgattcaatgcagccctgacctcccaggctcaaagatcctcctcagcatcctgagttgctgagaccatagatgcataccaccacacccagctaattttttttttttttttaatttttttgtagagacagggtcctcctgtgttgcccaggctggtctcagactcctgggctcaagcaatcctcctgcctcagctcctaaagtattttattactgttaacaagtaagggctgggtgcggtggctcatgtctttaatcctagcactttgggaggccaaggaaggtggatcacctgaggtcaggagttccagaccagcctggccaacatagtggaaccccacctctactaaaattacaaaaaattagccaggtgtggtggcgggtgcctgtaatcccaggcaacttgggagactaaggcagaagaattgcttgaacctgggaggctgaggttgcagtgagccaagatcatgccactgcactccagcctgggcaacagagtgagaggctatctcaaaaaaaaaaaaaaaaaaaaagcaaggacaccatggaccagagaggtgaagtaacctgctcaaagtcacactacttggaagaagtgggaagggtgggcacagttgctcatgcctataatcccagtactttggaagaccaaggtaggaggatgaggccaggagtttgaaaccaccctgggcaatgtagtgagactccatctctccaaaaatttacaagaaaaaaaaaaagaaggaaatgtgggcagtgaagccaggatgggaactaaaagatcagattcaagtagggactatacttcagcctctggctggtcctctggcacttgggcccctttcctcagggcatcatgccaaccttttcacctgacttctacagggtcacaggcacctacaaggtgacctgcatcgttcagttggctgcctctgggcagagatctagctgaagtcagtctgtgcctgtctgagtaggtcctgggccagacttggtccctgcctgcactgagcccccagactgttgggggaaaccaggcacacagaggccatcaacccaggaacacccctcctctccctcccacctcagggcctttgcacttattacctctgctaaaacaggcttttttttttttttgagacagggttttgctcttgttgcccagactggagtacaataatgtgatcttggctcactgcaacctccatctcctgggttcaagcagtcctcctgcctcagcctcccaggtagctgggattacagatgcctgccaccacacccagctaattttgtatttttggtagagacagggtttcaccatgttggtcaggctggtcttgaactcctgacctcaggtgatctgcctgcctcggcctcccaaagtgctgggattacaggtatgagtcattgtgcccggctcccccagatattctctgtcacctccccaggacttaaaaccctatcatctctaaaattatcttttttttttcttgttatcctctctgcttcccagtaagacagggtttctcaaccttttttttttatcatccacccctgcaaggagtctttttcagatttttttgtcctaattgccctcccatgaaatttgaatacctcagctatactatactatatatagtatatatagatatagatatgtataatatataatatatagtatatgtaaagtatatatatagtatatacagtactatatatactacatattgtgtgtatatatatggtatatatagtatagtatagctgaggtattcaaatttcatgggagggcaatacctatatactatatatactatatactctatatctccttatgtgctgtggccctgtggagagccacaaatcactgtaatgtctaagaatgcttcacttcacgccattggaggtgatcttaccaccattgagaatggactagaacataagctccatggaagccttgctcacggctgagtctccaatgccagcctcagtgcatacccctggtataaacagaagtccaaggagtctgggaacagaaaggagacattcatcccagaggttggggagggatgagcagggaagaggggactccaaaatggagtcctataggcttagtaggggttggttaactgaggaagatatggagtgaccagttaaangacagtgttggcaaaggcaccagggcctgaagcactcaggagtatgtagtgtggggccattccaagtgggtggccaggactgttgaagcctcttgaagtantggaagaaggaccttgaaagtgatactagcctgggcatctcctaggggccaagtcaggagacccagttttctagtgtaggctctactacaaaccagcagtggaaacgtagaatgggcaggtgggttggccttgctgacttcatgggcctacctggctaggaatccatgactctcctgtggaggtcattagccattgcctgtcgccagtggccctacaaacccccacatggaagtcagctaccccactt

SEQ ID NO: 4 - DNA, 2800 bp, Homo sapiens
  modified_base (312)..(312): n is t or c
  modified_base (2512)..(2512): n is t or c
gtgttattattgataagtaaggacttacccatgcccctttgttatttgttttctggttgttttgtggacttctcttccttctttcatttcttcctgtcttcctttattgaagagaattttctccacttatatgtgtacagatttttcttaatatctggtttatggcagttacacatttgtgcatctgtaaccatcctctctttaagtttgcatatacttccagcactataatttaaatttataatgatgtttggataccttcatgattcatatacccctgaattgctacaacaaatgtgccatttttctccntttccatcagtttttacttgtgtcttatcagctaaagtccaggaagagattgaacgtgtgattggcagaaaccggagcccctgcatgcaagacaggagccacatgccctacacagatgctgtggtgcacgaggtccagagatacattgaccttctccccaccagcctgccccatgcagtgacctgtgacattaaattcagaaactatctcattcccaaggtaagtttgtttctcctacactgcaactccatgttttcgaagtccccaaattcatagtatcatttttaaacctctaccatcaccgggtgagagaagtgcataactcatatgtatggcagtttaactggactttctcttgtttccagtttggggctataaaggtttgtaacaggtcctagtgtctggcagtgtgtgttctccagatttattatctttcttcaagattggtttggctactcttaggtgcttatatttccaaataatttttaaaggtattagtttgtcaatttcccaaaaccttgggctggaatttctggcagggtgacactaaatttataggctagtttggaaagaactgaatcttgacacgttgaggctttccattcctgaatataattatgcttccaatttgtttggggtttcttttatttaaccaggaatgttgtgaatttgttgtcatggctttcgagtctttggttttccctagataattaatatttttgttgtagaacataaatagtttttatcattctgatgatgttaatctgtcaactttgctaaatttactagtcactattcgtaatttatttctggattcattgtaatttctgtgtatattatactgtatctgagttaatattgttttatttcttattttccatttctcatgggcttaatgtctctttatcacattcattattgcattagctagaatttctaggagagcattgaatagaattggtgacagtggggatccttgtttctcatttctaatctgcaggaagcagtggaagttttccatttcaatattgagaatgatgcttgaagtagattttggtagatattttttatcagattagagaagtttgctgtcatatatatatatgtcataattgtgtgtaaaatcttgtcaaatcaacactctgcatctatttatataattgtgtgttagtccatttccattgctataaaggaatatctttgactgggtaatttataaataaaagagtttcattttggctcatggctctgcaggctgtgcaagaggcataatgtgggcaggcatctactcctagtaaggacttcaggtagctttcaatcttcggagaaggtgaaggggaagcaagcatgtcacatggcaagagagggagtaagagaaaaaggagtagaagtgactttaaacaaccagctagtgtgtgaactaacagaatatgaactcacttattatcatgggaagaggtttaagccactcatgaagaattcacccccatgtcctaaatacttctcacaccagaacccacctccaacattgagaatcacatttcaacatgagatttggaggggacaaatatccacacaacatcagattatatatattgggcttacatttctcactaaatagaaataagtatgcacatagagatgaactggccttcttcatattgtttaggacttcagtgtttacattcacaagagatttggtttatagttttatttctcagaattttcaagatttttgatattaagattatgccagccttataaaactatgcaagaaatgtttcctaatgtgagactgtttttattgccgttccctctccccacttttcttcttgtgatcacttagttgtatctttgaaatgcctgataacttttggttaaataccagatggtatatgtaagaaattgcagaattgcagaggaggtttatattcttcaaagaaagattcattcctctcccatcggcagtcataatgacatgatacctgttgtcatgattcagaattggacataatgtgaatccagttgaaaattgagtgtcagtgttagcttagctctctgaggttctcctacctttggaagcttgagaccaatttttgtcttgacagctttgcagtgccttctatcacatggtttctgtatttatccagacactccatttgccatctcaaacctactcttttccaatcaaaaccaatanatattattagtaaaataaaaaataatataactgaaagttgtattttcaaggggaaaaagcaatgagacttggtaaggttgcaattactaatgtcatcttttgaagaagacagaattgataatttacttagagattatggggcttaccctagtggtcactgagttagtacaagagaaaagacttcaatgcactctgttttcacaaacacaggagataaccaggagactttcgcttctcaaaattagggtctgagggtaatggtaatgaaacttacttcttctcctataa

SEQ ID NO: 5 - DNA, 56207 bp, Homo sapiens
  modified_base (1001)..(1001): n is t or c
  modified_base (9672)..(9672): n is g or c
  modified_base (10036)..(10036): n is g or a
  modified_base (20208)..(20208): n is g or a
  modified_base (21659)..(21659): n is c or t
  modified_base (45425)..(45425): n is c or t
  modified_base (45460)..(45460): n is g or c
  modified_base (48490)..(48490): n is g or t
  modified_base (54113)..(54113): n is a or g
  modified_base (55208)..(55208): n is a or t
tctcttgtagaaaggaagaaagtggtgctcaatattagataataataagtgagttgaactatttttctttcaagaactgtattacagcagcagaatgaattcaaacataaaacctaacactttctcagatggttctcatctatcaccagatctcattggagaggaacaggggctaaggttgagaagaaataaccatactactggaccactcactgcatttgccaactttcatttacacttttacaacttgaggtctgattccagtgaaaaacatactgagaggctcttgttcagaccagatcagtatcatgcagtttaagatcatcatgataatcaaatcttccagttcacagtaaggaatgccagttataataagacatggaaacaaaatgttcctttattcatataggtcctgcaaattgcctccccataatgcttcatttagtctccatactgtcctagtgagtgggaactcagtgggggtttaaagtggtgtactcaatggtcggtgctcaaggcaaggtttcttgtatcattccctggaacagcatttcaaagacaagaagagaatagtcccaccacaaacttcacatcaatttcctttcaaacaaaatcactgagtaaccatatgtatcagaagcccaccatctctcttctcttgctctagacttgccacttcaagttgaaaacataaagactttccctgatgaagggccattggctagtacatgagaatgttccagccatgctattgagatggagtttctggaaggaagatgaaaaaaatgatctatatttttcttgatttctgcccaggcatatctcttctgtaggcatcttggagttcttcccagaaggcatatctcaatgccaatcatgaataagggttccacttacttaaaagaataaaattgtttgttgttgtatgaatgggaagtgccagataaaaggagcaattgctaatcttcacctatagtgaagtccagagagaaaggatcacntcatttaccctgcttctcttctatttccacaccaatccctccccattcaccacgggggtcaaggagtctaccagagacagctaagtcagaacagagttgactgcctagatgtgtgattttaggcatgtcagttaattttcctgtctcttgttcctacacagaattagagtctatatcactctttatcttccttttacttttgccaaaggaaggcactaaaaacatgctgaggaatatcttgccagcatttacaactgcccttgaagagagaatatgtgttctcaacacagaaagttagaaatagggttcttcctactacattcacgcattatcaagatagcattatcattaggcacaatgtcttcaaatgttaaagaaaataaacataggatactgaaacgtgaaaaccatgttgctgaaaatgagtgatatgaggttcttaactccttagaaggcctttgcttcattctgctcacataacagcctgacattactccctgcttttatatgtcagacaagccaagttttagcagtgcatattctcttggtccccttatccaagggaagaaaagccttggagttcacattcaacccaggagttctagtcttagggcatgttcaatatagttatgtcatataactaatacatttatgcccaataagttatgggcaaccttggatatggaacctaacctctctaaccctctgtattagtttgctagggatgccataacaaaattccacaggctaggtgaattaaacaagagaaatttatttttgcacagttttgaagggtagaaatccaaaatcaacagggtggcaggtttggtttctcctgcaagacccctctccttggcttgcagacagatgccatcttcctgtgtcctttcctctgtgtgcacatttctggtgcctcttctttttcttataggaaaccagtcatattggattagggcgtaccctccaggccccattttaacttaactcacacttcaaagatcttacatccaaatacagtcatgttctaaggttagggcttcaacacttgaattttggaatgacacaatttagtccataacagcctctataaagatggcatcatgaagactgatgtaatataatttacagaatgatttctaaatcatctaaatgatttctaaatataattatatacaaatgtattattaatattattattactgtcataattattattctctctgacatattatcagtcttttgggaagtttaaattttcttcttttggaagactataccatagtggttaagagaattaggttgtttagatccaaatcttgggtcagccacttgttagctgtgtgactttcagacattatactaacctccataagctttaattttcctatccataaattaaggatggtaaaaaatagtacctgccttgtagggttgttgaaaggattaaaaggagcaatgcattaaaatgactggctaaaagtacatgctcaataaatgatggttgttatcaatagcagtatttagaccttgttgatgctgctgccttctttctcagccagcagaggtctccatcatagtcaaacaagagctagcttccctataactgcaccgcagttgccaagcacatccactgttggcagagaaaacagccgaagaattaccacactgaccaaacagaggagaaaaaaaagagagagagaacaggaaatggttaggatgccacagtaaaatgtaagatgaacaggtgaccataagttaggattgtttatgttctactgctgactttcactgatattgtccttggttgcatctcactttagcttgttccaaaccagttttaaaaaaggtatctatgtatatatcacagagaagcagtaagaatgaattggcaaatatttatgaagtcctctgaaaacaagaagtgctgctaagtaaacatttaacatttcttacagtattaagcttatttcatccttattgccagttatacgccatgcctcagttttgctacctttgtaatatgtttcctttaaccttcttttcccagacaggcttacacctccaagttcaattatcctgtcaattgtgttttaaattgtactgatttccattaaccaattgtggtatcaatttgatgatctgttccttctgaactaatcatctttacacccaccaaaatctggaaaggcaattaaactgaggaaggtgagagttattcaagagaaattaaagcataaaggtaaaaacagtggaaaaactaagattaaaaagagcactgaggagaaaatatacatgtactaaaaagcacagtatccgagcagatagagagacaaagaggaaaagagagcgaggtagaaaacggatactgcctatgcctactccatccctctttcagcaccaaggacagaacctctgagcggctgacccaagcaacgctcagtttagggtccctcccaaatcctctaaagaaaacggatacattcgaaagcagctatgaaacatgcactaaggtctaatagggaagctggaaaagcagcactcaagtaatttcaccttagaggcaaaaatgggtgatttctttctgttcatttcatagtttctgagtcctgagaaaggcaaagtttgctttgcttgggtatgtctgctgtcagtaaatggctgcaggagccgaagtggtaaactcctcggtctccagaaatcagaagaaaattttagggtaagtaatttttcttttcgtttctaatttaggacatagtattttcctcaaggttatttaatcagcttggggttctgtggatctctaaaaatatgcattaaaactcaatatccactcttatttaaaaaccaaagccctgaggaaatggttttctttttcttctaagtggttggacagcagaaaccttttatattcctttttcttttattttttcccccaaaattgtatccttgtgggctctagaagctatatcaaggaagaattaaaagatagaaaacaaaaagctgttattatttctaggatttgtatggaagttgattgtattcctcttaaggattttacttaattgtaagggtctgttattttaaactcctcaattcagcaccctggcaattcagagctgaaggtttggagaggcactattttcaatggtctatttaaagtcaggctgtttctaagtcagaatccaattattcccagcagagatatgtagtacttgagatgatgattgtgtatgtttcctttgatgatggtatatgatttttagggtattgttatttaattgtgagacttccattacttgctgtagcttactggggcaacagaagtcattgcaattaggtatttgttccagttcatgcatttagtttaattgaataccatcaaaatacatgcatgaataataatgcagcaatagcaaagtgaaacttggattctaaactcattgtgcatgactatttcactttataggtgaagcctttgcttactgatactaaaaggtctgtaaaatatctgtccttagataagagtgaagaaccactgcttgacatggcattaggatgtcttatagtcaaggagaagtagagacaatgtgagaaagattcttactcggcactcatttatttgtagttgaatattttcaagggtctgtatggctagcagtgagcaagggtattgagcaaggaaaatactgacagtatccaaatgggtgcctaatattaaagcatccatacagaaggctatttgttatggaatatacattaaagcaaataccgaacagtttctactcaatatcagattcaatttctaatgcattgaagtttgtcatcaattaatatttgcttattgattgatttatttgctgagttccccattttatctctgattagaatggtaggatgctcagtctctagaggttgtgaaggaaagtgagtatgctctgctttactagtcaggtttaatgaggggaaaaaactgttatcttagctactcagtaaccagcaatagtttttctctgtacatttaccaacaatgtaaatgtgcccaaatacataaatatgctatgtattgcaatccatttgtgaatctttttcaggaaaataggcagcaatttgcaagaagaaagtagcatagaaatgctaaagactatctctaataataataacaatgtaactcccactggctctatgagcagtgtgcacctgcattacttcaccaagcctagtcagatgatgtgacatgttcacatactctgaacaagtgagattgtaaaattagtacccatttcacatttgtctgcctcaccccaaaaagtggcatagttaagtggcatagttaagaacatgagctctggaatcagacaaatcttgggttgaatcaactccatcatttactggtttgtgatctcagcaagatatttaacctctctgtgactcaccttttttatctagaaaacttgataggataatagtgcttaccttcttcatcaggttgttgtgaggttgaatgatgataatgcttataaattttagctataattattaattttatcaggcaatatagcaagtccgaattacagcccagaccagaaaagctctggcgactggtggtcaggagtcgtctgagtaaaagattagatgtagcaacagccagagatctgtgaaatgagtgaagatgtggtcatggaaccctgttactgaagcgttttgttctgggttgagtaaaatccatctcaactcgggaatgacagttttgtgggtttttttttactttgagacaggatcttgctctgtcacccaggctggagtgcagtggcacaattatagttcactgcagcctctaactcctggactcaagcaatcttcctgcctcagtctttcgagtagctgggaatacaggcacatggcatcacacgcagctaatttttcttttcttttatttttgcaaagatggagtctcactatgttgcccaggctgatctcaaactcctggcctcaagtgatccttccatctcagcctcccaaagtgctgggattacaggaatgagcccccaagcagggctgggaatgactaacgtcaacttccatgctgctataagtattaaaatgcatgtaaagtactcatacttgccacacagtagtagcccagatgtagttgtcttcatcttcatttgttttcttacagaaagagaacaaataattaaaactctgtaagtcttaatgaggtgctaaggaggaaccccacgaatgtttcaggaagactgttattcagcactgagggattgaacatcagcaaagcaggacaaatgtcataactgatggggacctgacaactctctgttcccctgcctttttaaataggttatgcactcactctaagagatgccagaacaaactataaagaccaagataaatcaatactttgtaaggcatttaaaagctcattaaaatgtgtaagtagtgttatatgtaatgaatcttaaaagactgacgccaagagtaatcttctatttctctgccttctctattcttttacctcctatccacttttaactcctaacactgtttgctggactttttcctctgccaagaggtttgacagctacctaaaaatagtatagctgaatgccagtggctaattatacaaagggaaaccctcaactctgaaaatcaattctgagcctgatgttggaatcacagttgcatggatttctgatttcatatttattttttccacatctgatcttagatcctttatagcagaaggtgggttaaaccgtgattgttcaggtagtttctgatgagttgtggatgtgggagatgaaagcaaaaatgagtgagatgctagattactctctgtctctcagctaattgtttcaacttcctccctgcttagattttgtaagcatgaatgccatcatgaatatcgtcctgaatgtttaagcatgtcatcatgaatgttgacatgatgacattaagaatgtcttcatgaatgtttaagcatgaatgccaccatgaatgtcagtcatcatttccaagttcactagatactttacaattgcagcttatttaactcttcacctattcccactttcctcttaacaataaaagcaactatatttctagtgctatgtgccagacattatgctagagtgatgattcttcatggggagagcaatttgcacccccgctccaggatatgtggcaatgtctagaagcattttttattgtcccaacttgtggggaggggtatgctactggcatctagtgggtatatgtaaaggatgctgttaaaccccccacaatgcacaggacaacctcctcaacaaagaattattcagcccaaattgtcagtagtgccaaacttcatgtatataatctcatttagtcttcataataaccttatggaatggatatgattatctccattttgctgatgaggaaaccagcctatcattgtaaattacttagagagtgattgagttaatgaattctctaggctctttgcttcttcttacctgagacccgtttcctatctgttagcatatctaacagaggggaaaagaaagaagaaagcccagctcagttctgtgttatataagcaactctggtttgaaaaaaaaaaaaaaaatctaagcagggaggaagttgaaacaattagctgagggatagagagtaatctagcatctcactcatctttgctttcatctcccacatccacaactcatcagaaactacctgaacaatcacggtttaacccacctgctgctataaaggatctaagatcagatgtggaaaaaataaatatgaaatcagaaatccatgcaactgtgattccaacatcaggctcagaattgattttcagagttgagggtttcccttcgtataattagccactggcattcagctatactatttttaggtagctgtcaaacctcttggcagagtaaaaagtccagcaaaagagtaacaagtatcctaaggttttatgcctccctcttacgtggcaggtgagaggaggctaagacattattcaccagttgcagaccccagaaaagagggattctggccactgtgttccaaagtggcccagttgtgaaagggaagacatttgggcctcagcctgccttaaaagtgggaatatccttgaacaatcagaaagcattgtatttttccaaaagctcttggcagcagcggtgctatctccagggtagcggctgccctcctctgaataatgagaaaattataattattatcaagaattattattatgttttaaaatacattgagtgcaaacagtgtgccaagataaaggacaatttttttaaacaattctctaaattcattccaagtttgtcaccctttcccaagtatttgttcattttaactctttcatatttcaggctgaaacatttcaaagtgaggtacaaaatgacagccatgattaggccggtctcctaatcaagggagagctacagatacctggcttgagggcaaattctggccaccaagtcagcctctacttttgccaaggcctgaagagagagttcccataaaggtctatatgtaccatgcttaaatattttaaagttgtaaccaacaagccattgagtaaaatgtttcatcctcccaccttgacaaatacaccttcgtaacaacatggaaggccaagtttgaatttaagattcctggacctttcaaaattccatacaaaatgtgatcatacaggagaagctgggcccccacccctaatctgcttcagggaccctggcctcttctctcccaacctcaggctacatagaatctatttgtctgagctctaactgaaagccaccacttggccccaggaaccctacacatttatggcacagtctcccgtcagagtgagagatttagaatgagacccgtgatgtcttggaaacaggctctgagcagttgggtagagaattccctgagtgtggtctagacagggttgtaaacttagtggaccttctccttggcactgtgggaggttacaacatcattctatagaggttagaggcataaccagtagagggtgccttagtccttttgggctgctatcacaaaataccataaactgagtagtttataaacaacagatatctatttttgacagttctgaaggctgggaagtccaagatcaaggcaccagaagattcagtgtctggtgagggcctgctttctggttcatagatggctgtcttttcactatgtcttcccatggtgaaagagattagctagctctctgggtctcttttataaaagcactaatcttattcatgagggctctgtcctcataacctaatcacctctcaaagacccccacctcctaataccatcatattgggaattaggatttctacatatgaatttagggagacacaaacaccgagaccacagcagaagaccagagtggactcctctatagcacctcctctagagcttggggcaagagtcacttttgcttgggtttcagggttactccctaagtcacaggccttatgtcttcccctagccttcagaactgtgagacaacaaatttctgctctttataaattacccagactcaggtgttctgttatagcaacccaaaatggactaagatagatgggtttcattattcccacattttacatgggaagaatctggagctcanagaggtaaagtaatatgcataaggtcccagagttaggaagcagcagagctgggattgtaatcctgcaacagcttcccatctcactcagagtccaagcatggtactttcaatagccctgcacaatctgtctacctcacaccctcctattctactcctgcctcacttggctccagcctcaccagactccctcctatgacttctatgtgctagcccttcctgctggcccgtgttgttctcactgctcagactgctatcacatctgataactgcatggtctgcttcctgatctcctccaggtcaagactcaattgctgatttctccatgaggagttcctgattatactcagatactcactcacatacncacaatcttcacccgttacttacctgcctctctgatttgtctccaatatacgtatcattattgaacacaccacatcttttatttatcttgtttattatctgtcttctcctctagaatgggagcttcaaagggaaggaattaagattttatctgttttgttcattgctctatctccaactctcacaacagtgcctactatatagaaaatgctcaataaatatttgctgatgcaataaataaaaaaatgtaactaagcaaccaagccccaaagagtctgattttattaatattgttttctgtctcctcacaggaagccccttggcatcacgcacctccctctgggctatggcatctctgagccagctgagtggccacctgaactacacctgtggggcagagaactccacaggtgccagccaggcccgcccacatgcctactatgccctctcctactgcgcgctcatcctggccatcgtcttcggcaatggcctggtgtgcatggctgtgctgaaggagcgggccctgcagactaccaccaactacttagtagtgagcctggctgtggcagacttgctggtggccaccttggtgatgccctgggtggtatacctggaggtgagtagacttcaggtgcatgttgtctctatgactgtgctagtacttgtcttccctgagttctggcctttggggctcaaaagactccccagacagtcaggaactgaggaaggaaggagagctctcattctccctgtaatgagagagttaaagctctggaaaacagtcaccatcctgtccctcatccacatcagaaccaaggagctgagaatgattctgttcatgggtctccagtgttcaggtgactggatttgagtgacgggactcttcctaatatggcctagagtttattctctgtgccagacatgtctcaatgacatggtgggctgggtgaagcagtccagaagacctcttcaccagtgtttaatgtatatgagggtgagggtgtgcaggagggatgtgaggccaggaggaaaaaggaattatagaaaaaaaaaattagtgaatgtaagggaagatagaaagaatgaccagcgaacagatcagacttctttcgatggctcagtccctctttgctctttcctcctgggtaccagttctccatagactctgctaccaaaggaacagacaaaaccctcaaatgtatattttccatgtgtccatgaatagtacagagcctttgccagagagatagtgcagcagatcctggtgaattcttttggggagaaacatttattaaatttgaaagtattttcaattgggagtgcaaaacagagccagggggtggtcaagacaaaacacccatttgctaacaaagaaatcagggtgaccatatctgttcaagaaacagatattcttaccaggaaaacatgcaattacttaagatatgtttttttaaaaaaacctgagtatactattaatatttctcctctgcactgtgtgtcattttaaagaggtatccaatgaaggatcaaaatgatgctatgattaagagaaattaagattcatcaaattaatatctcagttaatattgatagtaaaagtgacagttaattaagtatgacatatcacgggagagcaaaaaccttgtacatagactgcctgtgctaatacctttgttaaagatggctgggaactaaaattagacttatgatctcaagggggagacataaagagagaaaaaaagaaaacagagaaataaaaggaaaagaagaaaaacaactaggctgtgtagatctaaaggctaagggaatacttgaggaaaaaatatgcatttattcttcccagttaggataatcctagttgggagggtgaagggtcttataattatcttgatttttctgtcaacccaattagtctgagtcaaccttgaagtcagagactagatctttactcttcatctcctgtagcctaaacatactacctggcacaaaatacatgctaactgctataacatttgatatatgaatgatgaaatgaatcttctctgtaatgtatgcattatatgggctattcctgctaataccatctgcctctctatctattgttacactcagactttttggggagaggacttttggggacgagctatttgttattttacatccaacaataatgagcctgaaaaaatttcgaagcatgtgatatttctgttcaagaatgaggcgctttaggtgcaaccagccaatatgaattggtcaataactcatagcactgtcatcatcttcctaaaatgtttttgtccatttctatgtgttccaaggaatgttaagtcctccagaaggatgaatggcaggaagaaatgtaggcagtggaccttcactctaatgagcatttttattccctctaagataaaaccaggcttttggtgtctgtaacaaagccactcaggggcatttgttggctatgtatttgtgattatttctaggactctggttggaccatactggaaaacatctgtatgtactggtttaggagatagacattgtgacttttccacactagaaatccatggcaccccttctagccataccttctgatatactggtgctcctattctactactgagcatagaagggcaggtgagactatagaaaatgacaggaaatcttgccaaaggccttaaagaaatcactgtagtagtacatataggttttcttccatgagaacagctctgatgaagtttttggtttctccccataaaaaccataatactatgccctctgtccaacaggttatttcatgtaggtattcagtgatcaagatcataatttttacatttgatcttaaccaaaaggctgagaagcaataagagcatgatttttaaaatctatattcacacaaggaagattcaggggagcagagacgtctcctcactggctttaggacctctttttggtcttaccaatttgcttcaagacccagtcaatgtcttgaagcgagttggtaagaccaaaaagaggccctaaagccagtgaagaatacagaggaccaagtctctccatcttacatcagtctatacttttcttaatctcaaatgttttcctatctttccttagaggcaaatgaggcaccttaatgaaagaaaagagcactttgagcccttaaaatatgggctatgaatacataaatccatgttcctcaagaagaagcaaagtattattctcactaacttgtcctaatgatagtacagtttgagtagctactctactaattacttaattatacctaagagctccctttggaaaagaaaagggtgcaatgttgaccaccgagactgctgtaggcttgagggcccccaggaagataagatgtacatgagaagaacaccactttgggatccaaaagattcaccagattcatagccgcatgtgctttgatttgaacacatccaccttcttcgaaggaaaattggctcattttgccagacaccagtatttatgaggtaggaatgttttggctgtaaatattggaaaccttgattagttgtggtttaactgcatttaatgtttttcaaataaccagaattctggaggaaaagaattattgtgttggttcagctgccccatggtgtcatcacagaccagacttttccatccttcctcttcaccatccttggcaagctggcttagttctttatcttgccatagcccccagcaccatggcagtattcaaaaataggatgggtagggacagcaggaaatgagagagagagagagagagagagcatgcactttccctgtagtagcttaaagcatgtttctaagaggtttcacataagcttaattggccagaacttagtcatgaggccacctttagctgcaaaggaagctaaaaaagaaaaaatgaaaacgtgtgttttatttataaaagatgtaggggtggggaattgctctgacgtaggcaataaagtatcacatttcctttattggaattcactgggatgaatgtcatttcaacacagtgtcatgctgtgagaaaaagactcagaacttggagtcagaagacatggatttaagtgcataaaatggaggtgacaacaacattttccaccctgagctgatgttagactcagctgtcatcaactgatagagtattttgataaccaaaacttttgatctataaatatctcacttaagacacttttaattataagtttaaaacagcttaactccaattggcttaaatgaaaaaacagaatgcattggctgtcataccaggaactttataaagtcctctggtagggtgggctgcaggcacagttccatcagggcaccagctccatttccctacagttctctcagctctgcctttttccatatactgaccttacctgcaggcaacaggctaagctataggtctcacatgtccacaccacaccattcacagcaagagagaaaatccttttcttagaatttctagtagaagtatcaagatgtgctctgattggactggcttgtggcacatgagttccagcttgaaaaattgatttaacataggttatatgtttcttctttggatactgcccagcgatctcatagattcacagtggcatctagggactatttattgaaaagatagaagaggatagtcagtaagtgggaaccacagtcagctttcattggtatcattctcatctttaagacacacaggagccttcacttgggcatatataagggggcccacagggaccagtcactgacgtgcttcagtattctctgtcctcaagcctggcagataagttcaggacaaaaaccaagcaggtgacctcacagaagattatatttcagagggcttctggcttggctatctgcttaattcagtttgcagcattttctcaacttttctgtaccatcccaaatagttctgtctcagatttcctctcaagattttaatttcctgctttaccgtctgcactccagagcttcctctccaagcacaaacttctcattttgttccactcagtgaagcaccttttgtgatgtttaaaacacttttatcaggatagaaaggcagtataagcggccaggggaacatttggaatactaaactcagactacttgggtcccagtgtagacaggaggaaaaacttgaggattaagaaaggtagtcaagcaagatagaataggatgagttcaggcaaggaaacgcaccacagaaaaagcgatcgaggtcggactgtgatgaaagaaaagaatagcaaaattttgggaagggaagaatctttgagttttgtaatgatatcgattattaaaaataaagaagtgggtttttttaaaggaaagttttaccacagctcaaaaaaccccaaatgataatttaagacctccctactggaaaacaaagacaggagattctcacgatctcgtcaccaaactctggattttgataaaagtcatagaatattaaagctggaagggcttggagattatttttgccatcatttccacagtgtgatccaaccacaggaaattcctggccatattctactgacatggtttctctgaggatgagtcttggagtctcatatccaaatgagctcctccatacttcttatgcacctaaactttgagcagctctgagctaaacgttcattagggggtgtgttaatccattttgtgcagctacaacagaatacatgaggctgtataatttacaaagaacggatttatttcttacagttctggaggcttggaagtctaagatcaagaggcctccatctgggaagggccttcatgctgtcatcccatggtggaaggtgggagggcagaagagaggcaaaaggggaatgaacttgtccttttataaggaacccactctcacaaaaacaacattaatccactcatgagggcagagtcctcaaggataatcacctctcgttagaccccatctcccaacactgttgcactggggattgagtttccaacacatgccttttgggggacacaatttatagcataagggaaggagagactgcttgttaaaaatacaaactgttggccgggtacggtggctcacgcctgtaatccccacactttgggaggccgaggtgggtggaccacctgaggtcaggagtttgagaccagcctggccaacacggtaaaaccccgtctctactgaaaatacaaaaattagccaggcatagtggcaggtacctgtaatcccagatacttgggaggctaaggcagaagaatcgcttgaacccgggaggcagaggttgcagtgagccgagattgtgccactgcactccagctagggcaacagagactctgtctcaaaaaaaaaaaaaaaaaaaatacaaactgttgggtctacctcgggtctaccaaaccagcatttccagggcagccctggaagtctagagtaagccccaggccccactcccaccttatgtgacttgtgcaaccagctagtcatctgctacgacatttgggaaccaataagctacaaaccccctatttcatagatggagaaatgaagatgcagagaagtgaaaaatccttatttattattctgttttgccccacagcaaccctcccaccaagaaatactccaaatgtggcaaacaaaaatggactgaagaggctaattagagaagtacttctatctttgcctcttagatatttccaaataactaaaaattcatccctttagagttggagttcttaatctggggagttcatcaacttggatgtaaataaaactactcctttattttccctgagatgaaatttagaatttcctttaattccaaatgtaggtatcaacccacagcagaagaaatctttagtgtcaccagtagaaatcacagattttttttcttaacttttttaactttctttttttttcttttgaaatggagtctcactctgttgcccaggctggagtgcagtggcgcaatctcagctcactgcaacctccaccttccgggttcaagcgattctcctgcctcagcctcccaaattttgtttaactttttaaccctccttcctgcacactgatgatatttatattttcaaaccacattatgattgttgcggacatcttgaaacatcacttatactcatcatttctttgaaattataggaattttggacctgccactagatcttgttatttaatgaattattaaagaaacacatatattttaaatactttgacaattatatttcaataaaactgatatcctttatgaaccactgtatttatttcatgctttaaaaacattcttctggcaaggcgcagtggctcatacctgtaatctcagcacttcgggaggccgaggtgggtggatcacctgaggtcaggagttcaacaccagcctggccaatgtggtgaaaccccgtctctactaaaaatacaaaaattagctgggcctggtggcatgagcctataatccagctacttgggaggctgaggcaggagaatcacttgaacccgggaggtggagattgcagtgagccgagattgtgccactgcactccagccgggcgacagcgcgagactccatctcaaaaaagaaaacagaaaaataaaaagaagaaaagcattcttctgagaaggggatcatgaagctaacgaaatccacaggataaagaatgcttaagaaaacctgctttaggaacaacaatttctcaggatcattttatgctccccttaaccccagaccagtgtttcccaaaccaagacaataagaatcacttgagggacttattactctgagcgaggcctaagaatcattttgtttaacaagagtgtctggagatttgggaaatgctgccttataatcagtaaatttggggaatgctgccctaggctgtgtctattgaaaatcaatagacaatttcagtacctgaagacactttcctgcttactcaacttctgtattgccacagggagttacttacattcattagcaagtaagagtaacaccacctggttgctgtataattctaaagtgagttattcattagaatgcaggagaaagaatcatgtctctaaaaagcctcaagtcaatttgatttttttcacttttttttttttttttttttttttttttttttgagactgaggctcgctctatcacccaggctggagtgcagtggtgagatttcggctcactgtaacctccgcctcccgggttcaagcaattctcgtgcctcagcttcccaagtaggtaggataacaggcgcccaccaccacacccagctaatttttgtatttttagtagagacagggtttcaccacgttggccaggctggtctcgaactcctgacctcaagttatccacctgcctcccaaagtgctgggattacaggtgggagccaccacaccaggccttttttcacttttatctgttttaatttcaaaaatcattttgcctttcataatcttccaacactttgtacctatctcacctttggtgcctatcacattgcctcatagctgttttttaagtacttatctcccgggccctcagttcacccatacccattcacacatcacttctggtaataggcacacattgtattctgagatcctgggaacaaaaacaggtttgtttcaatacacccgcccaagcaaagtatcagacatatcttgggcactcattagaccatggctataggggtaatggatggacacacaccaactcttctacctcctatgatattagaatagagttaaattgtacacatctctgaagaggcaagccactatactttgagaggcaggaagagtaatggtaatataaaggggtcaaaatcctagctccttttacaagctatgtgtccttaggcaaattactcaacccttccaggtctccatttggcaaattactcaacccttccaggtctccatttctttacctataagttaaaaatcacatttacctcttcaggttgtgatgagaaaatgtgtgagaattaccagcatattcttggcacctagatgcactttattgatcccttactatttgttgcttgatatggaggatgtcaatagaaaaaaaaaaattcattacaagtcccaccaattagagactcattttaatgagtaagctccagggaaggctaagtgatggcaccttagtgggaattattttaatcagctaatcagattgttttcttcttgactcttagctgaaatcaaggagagaatgagaattttcatggcagaatcaggagacaagaaaagaggatagccagaatgggatgacaggccattgggggcctggaagccagagaacagcttgagggctttgtcctttgggggctaagcaggaggggtattaaataaaactgtctgtgtactttcaccaaccccaaaggcagcacttaccactgtctcttgcactattctttgaaccctgggatagaggcaatcaggagagtgtctctttccctagaaaggagatgatatggtctgtcacacaaaaatccctgaggaacacctggttttcttctttcccctagtatctacccacttccatcccttttccaacaactatccctcctcacctaacacttccctatagcagggtgtgtaacaacctacattccaatgctctgtctccctgtactagccctgtgaccttggacaaagtgcttattctttctaagcttttagattcttcctctgcaatgaagataataatcctctgtcatagaattataatcggcaatagaggccacgtatgtaaagtgctttgcagaacaccaggcacttagtaagcgttcaataaatgttagctattattatgacagattatgtcagaggtcatttattatttcagaatatattttcatggttgggccctgctctgggagctgggggtgcagcagcaaacaagtaaatcttcctgctcctgttggtgttggttaagtaacaataactccatcccctatcaagtaaatgtataacttgtcttcaaaaagctttaagaacacatacaataaaaacaaattcagttttcaaagtctgaagtttcaaagttatagaaattcctggaatgggtcatgtgggttggtaacacatgtacagtgaattctcaataaatgttaattcctattaacaatattaggatatcatgatgatctctagtattttattgatgaatnccttacttctccagttatcttgtaaattctttaaggataggccctgtagtacattttgtaaaacctctcaacacacatgacatacactgctgcaaaccaagtactaagagcttcacaagtatttgctctacaagtgcatgaatgaatgaatatccagcaaacactgaagtttgctgttatcctaactatcctttctcacctactctagcccaaaacacaaacaaacatgtgctcacaattatgccaaaaagtgtttttttacccaatttaaaacattaactgcagagtagatataatattgaaataaaatttagtatacaaaatcagcttttgcaagacgcttttacagtatgcaactgtcctatgtaatgaagaaaaccttcttttattctcttggttcccctaaatcattgtgttattatgactctttagatcggaattcttatgtctcaatcttttaaaagctttttattctcagaattcctataaattcatattcagcctttatttatatagagccaattggtcaaactaaaagagagacagtaaatccataactggatttgacttcttcactagttttaattttcattgttgcttttaaacaaaaaatcattggtcagggtttctcaaaacagtctggagatgaccaagcacaggaataaaatgagatgcaaaaaaagaaataaatccaatgggaagaagttatcagggacagggaaggaaagacggccttttaggaccttattttattgggataaaacagaaatgaacactaaagtgacctggtcatataagaagatccttggatgagaaaatccagatgaaggaatagcactatctttatgcacagtcatttggtcagtatctgttttcttattgggaagctacttcagaggctactgtaccatttttcactctttcttcctcttaaatggccattgggcctgttcaggagcggtattgtgaatactcagctacagccagaggcacaaagcctggcaggtttctccccgagaactagggtccccaagaatgacagcccacccccccaggaaagaagctggtaactgcacaaagcctcgcggtccatgagtggcctttggtggacattttaaaagtgtcaatctccctgacacatcttcctgattcaattagggtatgtaaaggtttcaaaaataaatagaaatatactagagtataaatgatattatataaattcctgactgtaagcattactcagaggatgttatggagcttgaaatacatgtatagatagatgcatgaggttgaaaccatcctcatgaattctgagtagtggagagaatccagcccttttccccacttttggtttttgggatgtgggtggggagggagagtgttgaaggcagtcacattggcacagacttattttacatagattcccataaatgttgtttcagaatgtttcnaagctttacaagctgaagccagatagatttttactttggaggtaaattttatgaaaaatgtgttcttagcttatttcttgagtgcatgatgagctctctactgggtgaaggacttcagagagacagttttggcacaatgtacacatcgggtagtcaccgaagtccttttaccaccagctgagcatctatgaggaagttatcacttaaccacaaggagcattagttgcctcctgagtttgaatttcaacagtgattctcaaaccttggtatgtataggagtgtttatttaaaaatgaagattttagcccagcttggtggcgcatgcctgtattcccaactacttgggaggctgaggcaggagaatcacttgaactggggaggtggaggttgtggtgagccgagatcgcaccattgcactccaacctgggcaacaagagcaaaactccatctcaaaaaataaaataaatttaaaaaaaataaaaaagaagatttacagaccaaagagccaaagattctgactcagtaggtataggaaggattcagaaatctacatctttaataaacaccccactgtggaccacactttgagaatcactggactaactgacttggaagatcacttccagcattagcattctaacattctgtgaacttgtcctttctttaggcaaccagttttggatagcctggcactcccttgatgtccatctgccctgtgggaacaacggtacacagggagtaggagtgccaacatctacactaggcagcaaagcaaagaaaatagggccaactgggttgtcgttccttcactggggtaaacactaacatccttgtctctgatacccaggtgacaggtggagtctggaatttcagccgcatttgctgtgatgtttttgtcaccctggatgtcatgatgtgtacagccagcatccttaatctctgtgccatcagcatagacaggtagggctgcaattccccttccaggtggcccaaaagctggggaagtggggagagacagattgtgcacttgagggtactggggtcacctccaagtagaacttgacactggaacattttctttcctctctttttcttttaaagtatggtttgcaggtgagaagaaacccctgcgacaggtgggaaataacgaccctataagctttcctggcctttcttctcctccagctccctgaagaggattctggttttgcttttccaccatcctttggggttttttttttcttcctaataggaaggaaagcttcccattagggagggggagaaggaggaaaggtgagctgactggggttggtaggaaattctgttgttgttttgtttgtttttgttgaagggagagatggagagaaggtgggagagagaaagagaaagaaagaggggcaggtgtagggataatttttgagggggagagaggagagaagtgggggagaaaggcaattttagaaagcatggctgtgatctatatgtttctctcatagagcttagagaagcaagtatagtatgttttttaaaattacattttggttgctggggtgaattgctgtgattttgactcctctctctgtgtgttctgcctgagtaacattgctttctatccctgagagcacctggactcaccacccttgctctgggtccctctgtttctcccttcccctctccttttgtcttcctctcttctttcccctttcctctgcctgagcctgagatttgcctggctcccctgggacatcaccagcctcactgagagccctgggggaaaggaggtcactttcaagcctatggcccttgctgccagtcaaaagcctcctcccattcctgctctgagttctctccctcccactttccattccgcttcttctccttctcccagtaatatcatccatccacctcatagctccaacaggtgaccccaaataagatctgccatttattgagaatttatcacattgtgctaagctttgacacacattaactcatttcatcttcacaattcttaggtactgttattatcttatgtattatcttaggtactgttattttatggtataaacattggctaccttcaaacagggaccactgaattcagctgaatactctttgttcaagactctgtaatgggcacagcagggaaggtcacaggtgatcaggagctaggtcttgtagaagagtttggggtaatgataataaagcaaaccagctgcagtcctctatgtctgcaaataatgcactcctgaaaatgtgtactaaatgtctagaaattacacaaaagacttagatattagagctaaaaatattctaaaatccccaactcttcactttttaaaacagctttatgaagatataactcacataccacacaattcatccactcaaagtgtgtaattcaatgttatattggtatgtttacagacttatgcaattatattcctttttttttttttcttttttgcagagatgaggtcctgctatgttgtccaggctggtctcaaactcctggactcaagcaaccctcccatcttagcctcccaagtagctgggattactggcacatactactgcatctggacccctctttttttcttttttctttttttgagatggagtttcacttttgttgtccaggctggagtgcaatggcacgatcttggctcactgtaacctccacctcccgggttcaagtgattcttctgcctcagcctcccaaatagctgggattacaggcatgagccaccacatctggctaattttgcatttttagtagagatgaggtttctccatgttggtcaggctggtctcgaactcccaacctcaggtgatccacccgcctcaaactcccaaagtgctgggattacacgtgtgagccactgtgcctggcctacccctcttttttaaacacactctttaatggtattattttcagcattgtggacatgttctttagctttcttctcagttggctagccaaccaagtgatataaataaaaaatcatccaattagctgattggtttgcaggatcaccagagcaaagtgtgttcatattcatttttttggttattgttcaaaattcccacttcagcatgtaaaaggaaatgtgaggctgttgctacagagggcacaacactgggccaattgagggggcctgtgctatgacctctagaaaaagcaggctggagatgccacaacatagtgacagagaaagcattgtgaagttcaagggtgactgaatcagactgtgggaatgtgaaagggctttatggaaaagaggatcattgtgatagactttggagcatgagaagggtatggggcaacctgggaagagatgaaattgaaaagggggattgaggccaggcacggtggcttactcctgtaatcccagcaatttgggaggccgaggcaagaggatcgtttgaggtcaggagttcgagaccaggctggccaatatgatgaaaacccatctctactaaaaatgcaaaaattagccggacatggtggtgggtgcctgtaattccagctactcaggaggcagaggctggagaaccgcttgaacccgggaggtggagtttgcagtgagctgagactgcaccattgcactccagcctgggcaacagagcaagagtctgactcaaaacaacaagaaagaaagaaaaaaaaaggagagaaagaaaaaaagaaagaaagaaagaaagagagagagagagagaaagaaaggaagaaagaaagaaggaaggaaggaaggaaagaagaaaggaagaaagaaagaaagagaaggaaggaaggaaggaaagaaggaaggaagaaaagagaagaaaagaaagagaaagaaaaagaaagaaaggaagaaagaaagaaaagaaagaaaggaaagaaagaaagaaaaaagaaagaaaaagaaaagagaaagaaagaaagaaagaaagaaagaaagaaagaaagaaagaaagaaagaaagaaaaagaaagaaagaaagaaagaaagaaagacaggcaagccatattgtggaaaacattgaatgccaggcagtggaggtaattctaacttttattcaataggccaaggaggcactgagggattttgagtaaggctttacttctaagggaatgattttgatagtgctatgaaggaccagttagaaagtgcagcagaatttcaggtaagggatcataggatcctaaaataaataggaggaaacaagaaaggaaaagtaggggaaattttgaaaaaaaaaacggcaaaaggtctgtaaacaccaacctcttgaatatgaaagattaggaagagaaaggagtcaaacagaacacaagattccaggagaaagatgctgtcaagaagagatcaccatgtcgagacgatttggtgctttaatggtttggtttttaacatctggcataataggaacaagtggactatccaggaagtaatgtgatctggaactcaggggagaaggcagggatgtagttggagatttagggaggttagcacaaagtttaagattactaacttggagtcaaatagacatgaattctaatcctggcaccgcccagtactaatggtgtggctttggcaaattccttaaatactctaagaagttggaaattgaagataacaacagtacctaagaattgtgaagatgaaatgagttaatgtgtgtcaaagcttagcacaatgtgataaattctcaataaatggcagatcttatttgggtcacctgctggagctatgagatggatggatgatattattgggagaaggagaagaggcggaaggggaagtgggagggagagaactccaaggaggaaagggaggaggcttttgacttttgggaggaggctttcggaaaggacgtcagagaatgggagagggttcgctttgtgaagagggagaactgtgtaaagagagccccctcagccctcgtagttcctgagcctcctctcttccctcttgagagtgtgcctatacactccacccacctatattcttatgcacttagggctgtgggtgaggttgtgcaggttgttccctgcgcaagggtgtggaaatgaaattcagctatcactcccttttccaagcctagagttggccagaagagggtgcttttctacgatttgccagccaggagagggcgcctttctttaatttgcacaagagcaccattttgcggccagcagccatgcctaaaacacacctctagtttttaccacttaaaacgcaaccaacaagagtaactttgaattggcttctgtcccatataggaaaactccgagaatacacagcacttacctacctgaagggaccagccatgccttagatcccaagcgaaaacgaagctcccttcttggctcatagttctatatgggccaatgaattctcaccaagcctcaaaatggagccccctcctattctagaaatgaaaacaggccttggaaaagctgggttcattattcttcacagcagtttgcattacattctgttcatgtgatgacaaatagctggtcaattcattaaaaatgcagtcattcacgcagacctttggtcttcacacaatgccagtcaccaatctgacaaacttaaccaaatggattcagtattttttggtcatgaagccctgatctataataatgctgtggaaagagatatgaaagaaaaggaaatgataaaagggtttttgaaagcaagtaatactattgtcattagattcttaggcatagctctgatgcttggattaatgctgccatttcgtttttaaaaagcagagtgggaagtcctcggagcacaagcccccactcctttagctccttgcctccccagggagccagccctcctcccatcacatcctgggtccaaactaactcagggagagggctgagaatgtgtcagaagaggaggacacgaccaagtggtgagaattagagtcctccgagaggagcccaggaataatgcagccaaattcattcaccagggagttctttaagtggctctcaaatggcacccatcacacaggcaagcctccgcgtctttgcagcgagcacaataggtaccagatgagtcacaggcaccttggatttttagtttgcatctaaataagcactttatatttgcaaaaggctttccagtcatttgcaaaaagctttctccttcaacaactccaggaggggagtccacagaactaaagatatattgagccccctgtctgaccaaataaaagatggtgaaaagcagccctcacagaactctggggctcattaaacccaggcggggagttagagtcaggccttcccacccaggctggcctctttcctcctggactgctagcttcctaaagagcaacccttgtcagcacacacacacacatacacacacacacacacacacatctcccaccctgggacagggctctgagattgaaatcaaattctgcaaggtactgagaccttcagtaagtgaccaaccatatagatcctgctcataggaccggaagtcagaaggggcaacatcctgctcatagaaccagaagtcagaaggggcatcacagttatctcatttaagtggaaatgctaaatgcttgcatgaagtgctgcagcctcttagcacaggtgtgggactagaaatggaatctcctgactttccaccagcactctattacaataagtgacaccttcattggtgaaggtgaggatggggcacctatgtcttcaatgccctggctacctctatgctaatgctaacttacatgagtctggaagcaacaataataaaaatagttaacatttatttagcatgtactatgtgccagacactaagaactcttcattcattattgctaaccttcacgacaacccagagagagagatgtaataccctcactatataaataaaggtgctgagactagaatgggtaggtgagcttgccgagatcacacaactgggtggtgcaagagtaaggattcaggcagcctctgtctattacagcacactcccttactcagagatgctgaggtgcgagtctggctctgggctccctagctatagagtcacactgcctggctaaaaatccaggctctacagtttaatagcaatgtgaccttgggcaagtcaattaacctgtcagagcctcagttctcttatctgtttagtggagataataacaactacctcaaagggttgttaggaggattaaatgaattaatattcgtaaagcacttcaaatagtgcctgtcacatagaaagtgtcatgtacatttttggtggataaataaacaaatttaatattacctgatatcaggaggaaggggaagacaaccataaactcactgatatgaacaatcactgatcccttgagctagcacaataattatgacaacaataacaataataataccgtcttttgaatgtttagtattaatcactgggcactgtgacttaaaaaaaaaaaaggtttacagagaaaatatcattcaatattcattacagccttttcgggcagaaattattatccccattgtacagatgagaaaattggatcttagaaaaaacaaaccactggcccatggctacacagttcagtggcagagccgggattcagagctgatcagtccgtttctcatgcccgcggacttaatcaccaagcacactgccagtgctggggtcagcggagtcatccacaccagaaacggcccagggagctaagagctcagacacaaggggagggtccctggctcagggtctgcaggggcggcgcgcacagtgcgaggctggcaggtccggacctgggaataccgccgcgagcgcagcggccagatgttcagaggtggccctgggccaagcctctctctcccggccaagcccagcccagccctccgggtgctttggcgcggccctcgcctgcagtcggtcacgtgcaatcgctccgagaggaagtcagaggctaagcggtcggcctgggtgggaatgcagggtccctgcagggttccaggaagcagggcgccgggctttccctctctgcctccccacagagcctggagagcccccaggtgagcagtgaacttctcaccccagccgtgctggcagagttcttgctgcattatagtgccctccgatggccaattccggtacagcctccctgtcgcagtcggcttatgacaagcgggggcctcatttattctaacagtttaatcatgtttaaaaaagagcaagaaaaaaattactgtaacagtgttaaattgtagtcttgtctcttacttcttatccaagtgaacaaaaatctttgtcacagaagttttccctaatgcagactttctcaaaacctgtctaatcataagatgcacttgcttgttaaaaatacacatttctgttctcactgatatgtgggagctaagctatgaggatgcaaaggcataagaatgatacaatggacttttgggacttgggggaagaatccccaaggagggggattcgagagaggacttgcatcagatgaaggggagtggggtgagggataaaagactacaaatatggtacagtgtatactgcttgggtgatgggtgcaccaggatctcgcgaatcaccacgaagaacttatgtaaccaaatactacctgtaccccaataacttatcgaaaaataaaataatttcaaaaaagaagaaacaaaaatgcacatttctgggttccacttcagaagtactaaatcaaaatctccagaaactaagcctgatattctgcattttaacaggacccccaggcaattaacagaatcgagcgaattgaggaaactcagttgtgggcgcacgcagtgctctgcaagcggtaaccacccttgccatgctgacttcactgaggaagcccttgtcccccacaagaactcagagagctgtcgatgccctcgagagggaggagggcactcaggagaaacacacctcagaggtgggagacatggctctgccacaatttgctgcagaaccttgggctcataactgacatccttgcatctctgcttcctcctttatgggatagagccagggttccctacacttgttggcccacttcattaatggagcctccagggagttgctgaacattatagcatatttaggaaagtatataactctcagtggtctgctgaagccggcttatcatggctagcgagagctgattggcaaaattttagaaactttttgcatcagttattaaagctttggtggtagcttaaaataggccatggtgggagtattgacaccacagaaattggcaaataatacaaattagggctttttgtaaactacagagcctgttgttagccatttaccagcacaccactgaatacacagaagggtcaggctcttttacatcaaaggacattatgcaagtggaaggcctggagaaagtgagttacagtattccttcccctcgctgttcagtcatggcagcagcaggactcaaggctcagcccctcctccaaggtgcctcatagttaccactaacagcgaggcccttgtagacatattgtactagaagcccccggcagagtctaaagctctgaggagagtcagaggcctagagaaacaccagctgctacttgacctgctcttgtataaaccaaggaggggatttaagagaggacttgcatcagatgaagggaactaggttgttgtagcctcccaagaagtgggtagcaggatcttaatttgactttatcaaatttttcccttttgagaaagaagccacctttgtcatacagcatggtgtcaaggccaagtcctgcacagtttaccttcatctcagaactcacagctaactgtaatctgcccttctgggaatgcaaatgttactactctacaacaagatgcacaagaggcagattcgggcagtgctggcgcataggagcaggggaaacacacaggaggagcctcaggaagccttgcccgatcccttcgagcccagcatctgtccttcctttccttaatcccaggccttgaggtgcacaacaagggttaaggaggctccaggttccttggaaactgacaagacaaaaaatgttgagccattggtagatccagcttataccttagatccctgagcctggccaggattagaagggaaggaagccttcccctcttacaggaaaggaggccttcgtgacccatgaggcagacagttaacagtttcttattactttctttgtacaaggacctatggaaaatatcaaggttgtaagaagatttgatcctgaagtaactaaaattatatggagctctctctctccagccacgaggcaaattcagtcatgaggcaagacagctgcatgcaggagggcattgtaattgatttgcatagaagtgctaagagttcatagttagaagtctctgtacatgatggaaagaagtgggaaggtggctggaaagttcatctgagattaatggagggcaagattgagttgcccagggaggaagaaggaatgattaattgaacaaagacaccagtctctgactattgaagagtactcattaccaggccagtgtggctggagctgtgagtgtcaggatcagtgggaggtcagattggcaacgtaagttgaggtcatgttggagaaggctgagcttggtttataggtgaaagaggagccatcaacagtgtattcattttctattgctgtggaacaaattatcacatatttagaggcttgaactgtacccatttttatcttgcagagtctgtaagtcagcactgtgtacacagtgtaggtaggttctcttctcaggatctcacagggctgaaatcaaggtgtagactgggttgtgttctcatctggagcctgaggtcctcatccacactcactcaggttgttaggagtattcagttccttgcagttgcaggactgaggtctctactttctagctgactgtcaaccagtgctgttctcagctcctgtaagccttttgccatctcctaaaaaatgaccctctccaaaacatagcagtttgctccttcaaggccaaaaggataatttctcagtcccctttaagggctcacctaattaggtcaggcccactcaagataatctcccttttgattaacttaacctcaactgatcagtaatctgatcacaggagtgatattgcattatagtcacaggttcagcctacactcaacggaggggattatacgtggcagaaatcttggggccatcctagagtcctgcctatctcagataattttcaggtggggagatggggagacgtgatgaaatttatttttggaacctggcagcaggagaccaacgaggaggctgtagccatcatagaaatcaggtagcaggaaagggataggtggataaataaatggggaagatattgcaatggataaatttacaggacctggaatgttcctcccccgtctgacctcatggctggctccctctcgtatcactcacttccctgctcactctgtgttagttttacctcctccctggttctctaacacatcacccagtgtatttctttcatggtactcttcattttatattaacatatttgtttccttttttattgttcattcactccacttaactctaagctcaaagagaacagggacaatgtgccttttgcacacctctgaatacctggaatgaggcctggcgtatagttgggactcaataaatattgaataaagattaaatgaataaatgaccaaggctgagcacagtgcctcacacctataatcctagcactttgggaggccgaggcaggtggattgcctgagttcaggagttcgagaccagcctgggcaacatgatgaaaccccatctctgctaaaatacaaaaaattagccaggcatgttggcaggcgcctgtagtcccagctactcgggaggctgaggcaggagaattgcttgaacctgggagacagaggttgcagtgagttgagatcgcgccactgcactccagcctgggcgacagactgagattccatctcaaaataaataaataaataagcaagcaagcaacttatatgaaagggtccagggagagtcaaaaggtctaagtactgggtctggatgtcttcaagaaaggcagtcagtgaaaccagattgagaggtttggggagttggggagatcagttttagacatcttgagtttgagttgactgtggaacatttgtccagctaagtcctacgggcagctggaaatgctggtgaagaattgtcacaaaaaaaacacaaagatgtccaataatagtaaggaactgggctttggttatgtaaaagaatgaaaactggattttaaaataagccttcactggacattcctcatttctatttttaaaacatctactacttagaggagctgtcacaatgaaggttataatttatattaggatacaagcaggaggtaaatatcctctttaggtatgttctatcattgtctgaaaacctgcaggagacggtaaaggcacacagaccagcacccagagtgttcagagtgaagggtgtgtgacagtaaggccggttatgctgggtgatcaggtagaaccgataaagaagctctccagcaatccagtgatcctgtgttaacttttttattcttccctttctgagttcatctccctcagtaagttcttcatttatcttatctcaacctttctgctatttttgacctttctgcttttctctcttcctctaactaaattatatttctcatgctatatgtatcaacctgattatttctctacgaacttctttcatctggtcttttgaaaagttcccctcactggacttggtggctcacgcctgtaatcccaacactttgggaggctgaggccagagacttgcttgaagccagagagttgcttgagcccaagactttgagactagcctgggcaacaaagtaagaccccatctctacaaaaaaataaaataattaggcaggcgtggtggcggcacaggcatatcctagatactcaggaagctgaggtaggaggatctgatcccaggagttgaactgcagtgaacagtaatcatgccactgcacttctgcctgggtgacagagtgagaccctgtctccaaaaacaacaacaacaacaacgcagaaagaaaagtaccccattccatctcaccatgcctatcccctctccccttgctttttcaggtacactgcagtggtcatgcccgttcactaccagcatggcacgggacagagctcctgtcggcgcgtggccctcatgatcacggccgtctgggtactggcctttgctgtgtcctgccctcttctgtttggctttaataccacaggtaacagtgatggcttcatttctagcatccatgtgattcacagcacagctgaatgactggctgtgagttgtgctcagccctgcaatttctgacccccggtcagtgtactttgcaattaaatgagaatgccacagaatgcaaagctttggcctttgtgggttataaataaaatataaagcaaaacctcatcaattattggcacagggggtaaagttctgccccaattaatgaaaagtctggctcatctttattttgaaagaaatgtcattgtattcatttgcagaaatgtaccagttaaaaaaaccaagatatatattaataattcaggcaaggtttgctaataaaaagataacaattcataacagacctacaatgcaaaataacacattgtaaaagtcttatagtaggatatatacttctaactttttactcaataagaataatttccaattcttcagaactaaccagtatagattcccaaattcctggagagtatattttctatttttaatataaaaattctgggtatgatggttggcacatggtacatctcctgggtggatggatggatggacaatatatatgtctgaaatgctcgggattttaagcatgacaccaatacctcagatgaatcagtgccttctgtgtttgtaccatgtccatcttttagcctcactaattttttttctttttctttttcttttttttttttttttgagaccaagtctcattctgtcacccaggctggagtccaatggcacaatctaggctcactgcaacttctgcctcctgggttcaagcaattctcctgcctcagactcccaagtagctgggattacaggcacccaccaccacgccccactaattttatattttaccctgttggccaggctggtctcaaactcctgacctcaagtgatcagcccgcctcggcctcccaaaatgctgggattacaagtgtgagccaccgcgttcggccagcctcagtaatttaacgtgtcgaatgaaaggtattaaaccacatagtaacatgatgggtattgacaatatacactgcgtgctaaggaaaagctgcttgattagtgttccagtggtcatctggatttcttattttgtccatttgaattgattcattcaatgcctatattccaggtttgtaaatgtctagtatatatgtaccagtcacatagccatgtgcttgtgtgtatgcagatattatatgtaacatattacatataaatacaggcaaattctaactttaagtaatcttccaagtgtcatttgctggacaatgatttagaaatcaaaatatattttggaagataggtataggctctggagtaagtaaaatctaagtccaaactccaaatcaaagtccagacttactagctgtctctccttaaacaagttacttaacttctctgagttcctcattggtaaatgtgggataaaattacagtggagcatacacttgagtgaattaaaataagtaaacttgatctacatatttagttaagacatttttaatatttatttttatatatgaccccctacaaatgagcccagcaatttcatctctaaaattatatgttccataggaactctacaatatatgatatattactatatgtaccatacaacttattactctgcagggttataataaaaccatgtatatctttacatgtgattcagattttcaaggcaaatttggagtctatataattttcactttatttattgactttagaatctaagactacatataactccactccaacttcttcagagagatttttgccattaaatgaggattaaattgggataacatatgtaaatatgccaagcacgtaccgcctactcaaggctggcttgtttctctgccacagtaaagggtaactagccaacttatcaacaaatatttgcctgttcaacccaggctattctcaaaatatggtgatgttatctttgcgttactgtttacctttcattactttgttattttaactgaatgacactttatacacacaaacatgcacacattgcccagtacaaagcaacatcccttaacacagctacagaggctgactctgtggcactaaaatatcatttttcgtgaatgctaaatgtgctttatgagttagtctgataactaagtcaccttctgtaaccttgtttctatatgaaaatgcattcttagttggaaattctagtgtgggaaactcaccactgctagaccaaggcacttcttaccctctagccaaaagcaaatccctgccaacatctgctgggctgactgtggttcccctgactcattcttggtggaggcggtcttattcactctcacagacacaccacactggaaacagttgaaacaatctcaaaagctgacattagactgagttctcggttaatgtcgacatccagagtgaagaagaatgatgaatttgcagtgttgttgcccccagtgagatcattattgttccagaaacaaaattcaggaaagttttttccaaaaggatttttaagtatagaattgagaaggcagaaaaggcctgtgacttagtatgtgcgctctcacttctctctcgtctctcacaatcgctctgtcttttacatttaagtttattaatagcactctagcaagccttccaattattcatatattgtgttaaagtgtcaggttccattgtaagagctcagtagatattagctggtgttatggttgttattatttattggaaaagtttatacatcaaaatgtaactatacatctgcagtcgtaagagttctgctgatggttttagagatcagtcgccccttcctagaacacagttaggggatttagtaagtgaagctcaggcccagctgtcctcctctgcctcaagctgaccttcactgtacagcttcattatcttgatagatgtgggttcctgcagcaattctctcatctataaggaagttcccaacttcatttgaaagcccaatataaaggactcttctcagtcattttttctacaccttctgtggaaaatcaagggggagagggcaggatcctgccaataacacctgatattggaagcagctggactttcactaataagtgcaacacaaaaaaagaactttctggcagagctcttcttttaatgccatgggctgccacacgaaattgtgaattattagagaacataagatacagaaaagttgaacttcagtctcttccaacttggagttgctcctgttctcagatgaaaggtcaatatgaggcagggttttgggtgagagagttccgaggcaggggcctggctggccagggttgccttaactcccagcagaggcccagcagtctaggcaaatatcacatcatcaacagaccctgatacagcagagcatggtgtgctggtgccaaaggaaactctgaagatgcctgaatgagcagcccaaccctttcattgcatagataagaaaaataactagtatttaaattcctgctaaatcagaaagctattgtgttatttttaaaaatctagaatgaataagcaaagagtgaataagctgatgataagagtttaagaaatcttcaagggaggagaaacttaaagttaagaaaactctatcagctggcttgattttcctttgaaagaaggaaatggaggagtgctatttatttgatttcatcaatagaacatctcacctagttttcagagcactggagctaggttgggggagggggagcttagttgcacaaaaagttaagagaatagtagaagcacaaaattaaaagaataacaggcccatcctaaaatcagattcattggcaccgcatgtctttggaatcaagctggggtcaaatccatcaatgaatttgaagttcatgaatctttcaagtaaacctgctctgagccaagctgtccacatcatggtgggtctcagtttcccaagacagcctgcaaaagcctcatagatgcctttgtctttttcacccagcacagtgctttaaacatagtacgtactccacaaaatttgtagaatgagtaaatagatgactcttcatcatcatcctttcttcctgaaatgttgagattagttgggataagcatctctaatctcagaggaggagtaacctcccctcccccggcacaggccttctccattatcctctggtcagtgagtgctcatgtgtttatataaaatgctcatttgtacattttgctcatttatttattatttatgcacttgctcaataactattgtgctaacaaaacaacactcttgcagttaaatcatcaaaacaaggcacctcatctcctggggaagtgtcagcttctggggggcattacagctttccttacctctttggtacacagcagagaaggtttcagaactgctgctgtgtggtgcatcactctgccctgccaacaggacacacacccagggccaggcctgctgggggctggggcaggccctactcattggccacccacctccagtgtcactctgcctgcaatggggacattctggaagaggctgcaatgcttgatctaagaaagggaagctgtttgcttagataggggaggaaggaagagatggcaatgcaggttctgtgattatatgtgagagccttcgttgactagggaccctgaaatagctatatgccctctcaactctctctttcaatatttttaatggagaaataaatgcttgcacataaaacattcataaggtgcccatgagatacatacatacttatatgtaggtctcccttctaccccagattactacattctcccatctccctccctagaaacaaacattaatattcttgcaagataatgcttgcaacagtgtgcatgtccatacacaaatatgtttatgtatgtgtatgtgtattcattattacacaaatagaagcataccatacccctatctgaccctgactttttaaaagaagtagctcatatataaaatttagaggtcagcctcccagaacccagagtgggtaggaaaaggtagaaagttaggtggagggaccaacagggaatatccgggacaccaaggatgacaacaagatgggcagtgccaccccactggcctcttctcacacgtgagacatgtgaaacgcctccttatcacaggcaggttttaaaaccatagtcagatgctgacaacagaaaagctgacttcagagaaggagcagatcaccaccaacgtggctccctagagattctgaaagaccacgcactgccaccctatccctctccccaactccatcacccccaaataccagcagatgccaatttggtgaactacacagagcctatgagccattttcttttcttttctttttttttttttttttttttttttgagagagagtctcgctctatcgcccaggctggagtgcaatggcgcgatctcagctcactgcaactctgcctcctgggttcaagcggttctcctgcctcagcctcctgagtagctgggattacaggtgtgtgctaccacaccggctaacttttgtatttttagtagagacgtggtttcaccatgttggtcaggctcgtctcgaactcctgaccttgtgatccacctgcctcggcctctcaaagtgctgggattacaggcgtgagccaccatgcctggcccctataagccattttctaaaggatgatgacataggctttggtgaaacaacatgaaatttacctgaattttacctcctcttcagagaaccagagaatttaggagtagcttgtaaagattctagtggcaaagatgtcagtaaaatgcatcactggtcactgagcacactcttttcgttttagttcttagctgttatttccttccttctcccacaaatattgctccctataagtctgtctccaaattcccatttcagatgttaccttccctttcagttcaaaaggctcaggggagagaaataataaataataaataaataaatattaagaatagctaccatttattctcattaattctcacaactactatacaatatttctaggctttttcttttaacaggtaataaaactgaagctttgcatatttaagaaatgtgtcagctgggtgcagtggttcacgcctgtaatcccagcactttgggaggccaaggagggtggatcacctgaggtggggagtttgagaccagcctgaccatcatggagaaaccccttctctactaaaaatacaaaaaaattagctgggcatggcggcccatgcctgtaatcccagctacttgggaggctgaggcaggagaatcgcttgaacctgggagatggaggttgcggtgagccgagatcgagccattggattccagcctgggcaacaagggcaaaattccgtctcaaaaaataaataaattaattaattgattaattaaagaaacgtgtccaagatcacacagttaataaatagcagacctgaatctcacactgaaggctctctggcttccacctacctcagaagaccaagaagcagaataagggtcctacatggccactgccctctccccaccagcccacacctgaggcttcatcttccaaggccaactttgaggttggagaatccccaaccctttatgaagactggccgggtgtaccaacagttgttgctcacagtgctggatgaagcacagatgttccatgtcacaatggtaaagagggatggggagttaaaattatagaaagaacattggcttgggcataaaactggctgcaagaacatatttttcaggtgcagccttgggctacttactgaacctctctgagctttaatctgctcatccgaaaagagagacagtaataatggcacctgtctcatataacgttgccttaattattaggtgggataaggggtacaaagctcttggctcatcgcctggcagatattagtttgcttttcttttctttttcaagatggggcacgtttcaggcccatcttgggccttggaggaatctcagcatctgctatgaagaaggcaaagctagagggacctcccaaggagaaatggcaggaacatttcaggatataaagcagggacaaggacccttctaagtgcacattctccatgtcacaatatcattacctgcctttttcccatcccacctctgacaagtgctgggattccctgaaaaatcaaatctctgtcttgtattcagccgccatctgccctccatcccagattcaaaattggagaactggcattctcagcaaataaggcttcttcctttcattgcattcaaacaattctccaatgcctccgcaccagcaggcccttttctgagggctgcatccctcctgggagcctctgccctgttgccctgtaatgctctccccagcctcccaggctgcatgtctctgtgtgacacttgtgacatcctatgaaagggatcatctgtctatctagactgtttgctcccttgagagaagacatggtgtctcattcatctttgtagccccagtgtctggcgtatgattgttggtaactttttattttaagcaagctgtaagaaactcaaagatgaattagaccttctaccctcaaggacctgacagtatacgtatctgagactgcatccttcccaccccctgtgcagcagaaagtgcaggcaccacacgtgacatggagccgtgttttatgctccttactgagttctgatacttgctaactgctttaccttcccccttctcatccacaggggaccccactgtctgctccatctccaaccctgattttgtcatctactcttcagtggtgtccttctacctgccctttggagtgactgtccttgtctatgccagaatctatgtggtgctgaaacaaaggagacggaaaaggatcctcactcgacagaacagtcagtgcaacagtgtcaggcctggcttcccccagcaagtaagtaccctggagggggtagagggaagacaacacccaatctcctgacttcccagcctgtgtccagcagtgcatgattttgccgtttagctaaattggagacacaaatctgacaccgactttggaatctgctaattttggctgcgctttgaaggtaggaaatccaatctcaagaaaacattgatagttgcctctagagcctgccttacctggcaaagtgattggagagctcctgggcttgttctgcttcccttcaaagtctttcattttccccaaatgggcagcagctcagatgtcccacaggttttgaagtttaagtgcagcagttgtaccttgcactgctggtgggttcccagaactgactttttgtctaaaccactcatgccaagaatcactggggtccatcaaagccttttttccttactggatctgtccgtgtgtcaaggaactgacaagctggtgggatagggtgctgataaagcattttattggatctttctaggctctgaaaagaaatgtcattgcctctgcaatgatcttctaattgctagggctttaatttctccttaccccattgtctggcacttagtagttttcccacgatgtacttgaagcatgaatggatatataccgatcacttgaaatctactagggaagggacagtggtaacattaaacagcatctgccttcatggagcttagaatctagaaaagcaaataaagcacccctccactcaatgttaatgaagatcccagagctgaataggatgtttgccaaatgtgaggtgaagacaattaagcactcaattatgaagtgctctggaggttatagaagagaaaacccaatatgctcagtgatatggtttggctgtgtccccacccaaatctcatcttgaattgtagctcccacaattcccatgtgtcatgggagggacccagtgggaggtaactgaatgatgggggtgggtctttcccttgctgttctcatgatagtgaataagtctcacgagatctgatggttttatgagggggagtttccctgcacaaattttctcttgtctgctgccatgtaagacgtgcctttcaccttccaccatgattgtgaggcctccccagccacatggaactgtgaatccattaaacttctttttctttataaattacccagtctcaggtatgtctttattagcagcatgaaaacaggctaatacactcaggaaagggctccatagacagagtaagaattgagtttgatcttgaagacagatccaatttgggtgtctagattaatctttgatgacctagataatctttttttttttttttttttttgagacagagtctcgctctgtcacccagactggagtgcagtgacatgatctcagctcactgcagcctgtacctcctgggttcaagcgattctcgtgcctctgcctcccgaatagctgggattacaggtgcccaccaacacatctggctaattttttttttttttttttttttgagacggagtctcgctctgtggcccaggcgggagtgcagtggcgcaatctcagctcactgcaagctccgcctcccgggttcacgccattctcctgcctcagcctcccgagtagctgggactacaggcgcccaccatcacgcccggctaatttttttttttttgtatttttagtagagacggggtttcactgtgttagccaggatggtctcgatctcctgacctcgtgatccgcacgcttcggcctcccaaagtgctgggattacaagcgtgagccaccgcgcccggccacatctggctaatttttgtatttttagtagagacagggtttttccttgttggctaggctggtctataatgcctggcctcaaatgatctgcccacctcaacctctccaagtgctgggattacaggcataagtgcccagcctgatgacctacattatctctgatgacctgttaaggtctttgatgatgtcaaaagtatgaatgaaggtcagactcttaagttgaagtcccaaggcttgagtgaaacaagactattaatccccatgaaagaggagatcaagacccaaggctgaggatatgaaagtattgcattcaaaatattatcatgtcccatggctatcaatgacatggctagacccacaactaactgttccttcttctacaccccctgcccagtcttcttgtctgcacctgcaccccattcagcagttgtcagtaagggcctgatttccatcacatgccacaggaaaaatggtaagtgggccatgtctgatcatagagaaagaataagagaccttttcccacaatactggcttatcttgattctactctcaccccagaatgaaaccttaccctgattcccacacatatatctataagacaagatctgaaattcttcctaatttaagcttcagaatagaattcatcagaagatattgagaaagcatatgactattggacttgaccttagtgactggagccaatgactcttgcacacggtgtgacaatgccatccaaggccacctgcattagaggaaacagangtcaagggaacacacatggacagagcaaaaaccangcagagaaaggaaaatttcaagtgccatatttaccactgaatgtgggaaaaaccaagacaacttcatggtcaccattagccttgttcttccaattcaagccaggcctgcctcgcccagctagcagagtgcagagtggagtctggaggtgttagatatgagaacagtattcctctctgaattccacattagaaataaaacttcaaaaatttgtaataattaaggtctgagctttgttcaatctcagtatagttaatgactttctacacaggcctggtgtggtaattggagataatcattttaaacgataatagctatgcagctcaaagttgcctatggctgatccaaggtctaaggaggcttcaaggccaagaggaggaaaaatattgaatacaaaagagagatcagacagccaagagactggcatttccaagagtgtggagaattaggttctgtcctgccatctgggagtggagggctctgccagccagacccagaggaatccagtgtttcctcatgtcagtcatggaagtagtgatcaggttttgcagacagagctgaaaaatacactcaccaatatataatcttggaagaatcattttcctactataggactgaatttccatatctgtaaaatggaaacagggtatactagatcaatgttttcaaatatgaggtttttttgtttttgtttttgtttttgagacagagtctcactctgttccccaggctggagtgcagtggtgtgatcacagctcatggcagccttgaactcttgggctgcacccagctaatatgagatttcttaggcaatcccaagaatttgtttcccatcccctagttttagaaataatgcgttagaagtcaaatattgtcactttaagaagatcagtaggtgccagtttaattgtaaacataatcttggggccgcgtgtggtggctcacgcctgtaatcccagcaatttgagaggccaggatgggcagatcaccaggtcaggagttcgagaccagcctgaccaacatggtgaaaccccatctctacttaaaaaaatacaaaaattagccgggcatggtggcatgcacctataatcccagctactcaggaggctgaggcacaagaatcactctaacccaggaagcaaaggttgcagtgagcagagatttcaccactacactccagcctgggcgacagagggaaactccatctcaaaaacaaacaaacaacaacaaaaaaaaacaaacaaaaaaacacaccataatctctgttgtaaataggcattcagataaaatgaaatatgcttattttaattattagaaaatgccatcaaactaaaaaccaaaaaatgttaaatatgtattctcttaacttgacgtcatgttaagtgaaataagccagacatagtaagacaaatatcggccgggcgcggtggctcacgcctgtaatcccagcactttgggaggccgaggcgggtggatcatgaggtcaagagatcgagaccatcctggctaacaaggtgaaaccccgtctctactaaaaatacaaaaaattagccgggcgcggtggcgggcgcctgtagtcccagctactcgggaggctgaggcaggagaatggcgcgaacccgggaagcggagcttgcagtgagccgagattgcgccactgcagtccgcagtccggcccgggcgacagagcgagactccgtctcaaaaaaaaaaaaaaaaaaaaaaaaaaaagacaaatatcacatgttctcaatcacatatggaagctaaaaaagtggttatcgtgaaaatagagagtaggttcatggttaccagaggctaggaaggagatgggggagggggcgagaaagagaggtggattcaggggtacaaacatacaattaaatagaaggaacaagttctagtgtctaatagcacagtagggtgactacgcttaacaacagtttttatatatttcagaatacctagaagaaaagatttgaaatgctcccaacacaaagaaatgataattgtttgaagtgatgactagcctgatttgatcattacacattgtatgcatgtatcaaaatattgcatttgccccacaaatatgtaaaattattatatatgaatttttaaaatcttcaagaaaaaaatgtatattattctagaattcctaagaatacctctgtggaccaccatttaaaaaaaactctaggccagatgctgtggctcatgcttgtaatcccagcactttgggaggctgaggtaggtggatcacttggggtcaggagttcgagaccagcctggccaaaatagtgaaaccccatcactattaaaaatacaaaaattagccaggtgtgatggtgggcgcctgtaatcccagctactcaggagtctgaggcaggaaaattgcttgaacctgggaggcagaggttgcaatgagccgagatcatgccacttcactccagcctggtgacagagtgagactttgtcttaaagaataaataaataaataaaaattttaaaaacttaaattggctgggcatgttggctcacacctgtaatcccaacacttttggaggccaagacaggaggatcacttgagcccaggaatttgagaccagcctggccaacatagcaagacctcatttctactaaaaataataaataaataaataacactaaatagtcttgaagaccgcttgcattcattcattcattctgagtatgtacaatgtgccagttctgtgtacctagaagactgcttccttgaactaaggaaaccaaagcgaggggtttttgttgctgacactgaataacttacgtagaaaacaaatttactggaaagctgtcaggtggctcacaggctcaatgagaaggctgaagaacagcttcagaaagatgctattcatgcctaagaaataatctagttagaaaacctaacacactggacattgaatgccaccactactagaggagttctgaagtctccctgcttcacaagttccagttcaaagtctcaggtgtgaatctgcaattgactgggcttngtgcatgtgcctgagctctagctgcatgggaatggaggtatgaagtgaatatctggcttttatgccatcagtaatgggagttgaagagttgagttctgcctcctgttcaagactgacacaatagtctgattcttcaaacatgaaaagaagttcaagttgggcacacacacacctccccctccataccagaaaagttaacatatttcagtattccattctcagaggctactcatcccaaacccatttttccctatttcttttctgttttacaaaggaagctcagagatattaaattaacttgcctaaagatacatctactaagtaagagagctgagaagaaaatcctgggttttctttttttttttttaatttctattatggaagttttcaaaaataaaaaagtagacaaatataacaaccccccagtagccatcaggcagcctcagtcgtgatcaattcgtggtcagtcttatttcatctacaatcccacctacgttcacacatccccactggattgctatgaagcaaatactaaacaccgtattatttcaacccaaaatatttctgcaagatcctctaaagaatacagactgttggccaggcacggtggctcacgcctgtaatcccagcactttgggaggccaaggtgggcagatcacatgaggtcaggagtttgcgaccagcctgaccaacatggagaaacccatctctactaaaaatacaaaattaggcaggcgtggtggcacatgcctgtaatcccagctacttgggaggctgaggcaggagaatctcttgaacccgggaggcagaggttgcagtgaaccgagatcacaccactgcactccagcctgggcaacaagagcgaaagtctgtctcaaaaaaaaaaaagaatacggactgttttataagacacataaccacaataccacatcacactaaaaaattaatagttttctaatatcattaaatgtccaattgatgttcaaatttccccaattgtcttgtaaattattttacagttggtttgtttgaatcaaaattcaaataaggcacatattttgcaactggtaagtattgtcattgttgttgttaaaatttatttgttgaagaaactgagtcatttgtcttgtggagtttcccacactccacatttcggggcttatgtcatagtggtgtcacttaatgtgtttctctgtatcaccaggtcattctaactcaaaaaggccagactacaattctgtgctaccctgctcaagaggttgttgtgattatcaaatgttctatatgtggtgggtgctgctttttttttttttttactttaagttctggggtacgtgtgctgaacgtgcaggtttgttacataggtatacatgtgccattgtggtttgctgaatctatcaacctatcatctaggttttaagctctgcatggattaggtatttgtcctaatgctcttcctccccttgccccccatcccttgacaggccctggtgtgtgatgttcccctccctttgtccatgtgttctcaccgttcagctcccacttatgagtgagaacatgtggtgtttggttttctcttcctatgttagtttgctgaggatgatggtttccagcttcatccatgtccctgcaaaagatatgaactcattcttttttatggctgcatagtattctatagtgtatatgtgtcacattttctttatacagtctatcattgatgggcatttcacttggttccaagtctttgctattgtaaatattgctgcagtaaacatacatgtgtatgtgtctttacagtagaatgatttataatcttttggatatatacccagtaatgggattgctgggtcaaatggtatttctggttctagatccatgaggaatcgccacagtcttccacaatggttgaactaacttacactcccaccaacagtgtaaaagcgtgcctattctcatcctcaccaacatctgttgttttccagactttttaatgattgccattctaactggcctgagatgttatctcattgtcattttgattgcatttctctaatgaccagtgatgacaagctttcttttatatgtttgttggctgcataaatgtcttcttttgagaagtgtctattcatatcctttgcccactttttaatggggttattttcttgtaaatttgtttaagtttcttgtagattctggatattagacctttgtcagatggatagattgcaaaaattttctcccattctgtaggctgcctgttcactctgatgatatggtgggtgctttttagttgtaaagtctaaagcaaatttcatttcccttaacttctcatggtcccaccactccctcagatgttccctttgtaggtttcccacaactgtgttgccgtcttccttctttgaattctctggccctttcaggaacattcagaagataaacaatacccccagaaatgtcaagattccctcttgtcacacctgcagaccctctctcctgacccggcacatctggagctgaagcgttactacagcatctgccaggacactgccttgggtggaccaggcttccaagaaagaggaggagagttgaaaagagaggagaagactcggaattccctgagtcccaccatagcgcccaagctcagcttagaagttcgaaaactcagcaatggcagattatcgacatctttgaagctggggcccctgcaacctcggggagtgccacttcgggagaagaaggcaacccaaatggtggccattgtgcttggtaagtttgggttggcttgagctgtgttgggttgggttaggttgtgttaagttaagtggagctggtagaagatgctatcggaaatttgatgacagtaatacttatcaaatgttcacaatataattgaaaagtatttgtgtataaatgctaactctggtggaaattcaaaagacctaggctgaaatttatgaagctgaacaagccacttaactgcgctgtccattatatggagctacaacacataaatcaaacaataagtaagataatgattcaataaaactgtctggtacatattggatatttaacaaatgcttagttatttaaaatattaagtgataaaaataagaatgcaaaacactattgtgatatggtatgataaaatctagattactttaggccgggcatgatggctcaagcctgtaattccagcactttgggaggccgaggtgggcagatcacgaggtcaggagatcgagaccatcctggctaacacggtaaaccccgtctctactaaaaatgcaaaaaattagccaggcgtggtggtgggcgcctgtagtcccagctactcaggaggctgaggcaggagaatggcctgaacctgggaggcagagcttgcagtgagccaagatcacgccactgcactccagcctgggcgacagagcaagactccatctcaaaaaaaaaaaaaaaatctagattattttaaatacagagtaaaaaagactggaaagaaattcaccaatatatcaaaagtgattgtctttgagtggtgggtgcttattccttttttcctacttgtctgtatttaccaagctttccataatgcatacaatcaagattttttgttttttgtttttttgagacatggtctgactctgttgcctaggctggagtgcagtggcacaatcatagctcactgcagccttgaactcctgggctcaagcaatcctcctgcctgagcctcccgagtagctagaactacaggcgtatgcccccatgaccagctaatttttttaatttttatttgttttttgtagtgacagggtctcattacgttgcccaggctggtctcaaactcatggcatcaagcaatcctcccatctcagcctcctgagttctgggttctctgcctcctgggttcaagtgattctcctgcctcagcctcccaagtagctgagattacaggcatgcgctaccacacccggctaatttttgtatttttagtaaagacaaggtttcgccatgttagtcaggctggtcttgaattcctgacctcaggtgatccacccaccttggcctcccaaactgctgggattacaggtgtgagccactgtgcccagcctgaactttatttaaataaagaaattaaaaatgaataaatcacaggtatgctatagagttagtgaaggcagttcatcctgttcagtgtcactgacaaaccccaactctctcctgtatcagggagtttactagaactcctagatgtaatctcctcaacagcaggaacgatgtcagtcacatctttaaggtcttcatacctatcagtgcctaggatcatgttttgcataggtaggcattaaataaacgtctgaattgaattgaaaaagaaaaagactagtaaagaactacctagagacccaactagaaaactgatttagtaacaaaggccaaagtgaatgaaagacattagcatgcagttttctcacctaaaaaagtttggctaatcacacctatttcatagggttgggttttttttgttttgttttgttttttttgagatggagtattactctgtcacccaggccggagtgcaatggcgcaatcttggctcaccacaacctctgcctcccgggctcaagcaactctcctgccccagcttcccgagtagctgggcttataggcacgcaccaccacgcccagctaatttttgtatttttagtagacatagggtttcaccttgttgcccagactggtcttgtactcctgacctcaggtgatccacccgcctcggcctcccaaagtgttgagattacaagcgtgagccaccacacccggcctagggttgttataaaaaaaagtaagtgggtatgcaaaacttccagcttagtggctggcataaagtagacaaccgtgagtcattctcatgttataacaaaaggagtaagcaaatcccttacccagtttctctcttatttggcaacttaggggccttcattgtctgctggctgcccttcttcttgacccatgttctcaatacccactgccagacatgccacgtgtccccagagctttacagtgccacgacatggctgggctacgtgaatagcgccctcaaccctgtgatctataccaccttcaatatcgagttccggaaagccttcctcaagatcctgtcttgctgagggagcagaagagggaacactctttgtacccatttctagctgccaggctgttggcccactcagaaagactgtgcagtgtcctccggcatgcagtaggaagaagattcctggagccaggatgtccctgcttgtcaggtataaccagatgtgtcctccaaaacagaatattctacctccccagctaaaatctgacttcattctgacaatcttcaaatgactggggagcttccaagtgataagcaataattcagaaagaagctgataaaacatgactcacacaaaattgtcatcagaggcatgattcattacactgaaggaaaatgaacagatctcatcattctcaacttgcaggggtccttgaaatcagccagtaaaccaccttctagaacagccagtctgtcttccttcaaacctctaattaactgtcaggctaaccttgtacttttacgggcccnttcctcttggtcatttctttccttcactgtatctggaactgtgaatggcaaggccagtgcttctacctctctgtagaatccgatgggctacatttggtgaggtgaatttctcacaccaagagaaacactgtcccacattgggatgggggcttcatttcaaactttgctacccttgtattttagctttagctaagaaggctttctgattccattcctttactctctagaggaaatctcagagtctcaacttccagaatcattcaagatggggatattttctgaagacggaatgacacatcccattgtagtttcactgttgaaacttatggttcagaacataccttagatatgcttttcataacactaccaaattttcctacccagggcatctccatttctgcttaacagggacccaatatagtggaccacatcatgacattttgggcaacagtggaccacatatacaacggtggtctcataagataataatggagctgaagaatttctatcacttaatgatgtcatagctgttgcaacatcatagctcaatgcattatttacatgtctgtggtgatgctggtataaacaaaatgatgctgccagtcgtgtaaaagtatacaattgtgtacagtacgtaatacttaatattgataataaatgactatgttactggtttatgtatttactatactaaacttttcaccattttagagtatgcttctacttatttcaaaaaagttaatcataaaactgcctcaggcaggtccttcaggaggtatttcagaagaaggcattgttataagggatgacagctccctgtgtgttatcgcccttgaagaccttctaatgggacaaggtgtggaggtgggagacagtgatattgatgatcctgacccggtttaggcctaggctaatgtgtgtgattatgtcttaatttttaacaaagcagtttgaaaagcaaaaaatagttttgaaaatagaaaaaaatatatagagtaagtacataaagaaagaaaatattcttgtccagctatccagtgtgtttgtgttttaagctaagtgttattacaaaagagtcaaaaatgtcaaaaaaantttaagtttataggtaaaaaagggactgtaagccaagattaatttattattgaagaaagaaaaacttttaaaataaatttagtgtagtctgggtgtacagtgttgataaagtctatagtagcatacagtaatatcccaggcctgcccatccactcaccgctcactcactgactaacccagtcttaacagctgaactcagcttccagtctgcaagctccatttatggtaagaatcctatataggtgcaccgttttttgtcttttatatcatatttttactgtatcttttctacgcgagttatacaaatactccccattgtgttacaattgcccacaatattcagcacagttacatgctgtctggatttatagcctagaagcaatagactacaccatatagcctaaattgtgtagtaggccatatgatctgggtttgtataagtatactacatgacgtttgcacagcaatgagatcacctaatgatgcatttctcagaacatatccctgtagttaaacaatgtgtgactgtactctcagactctgagactcactaagtagtgtccacaaagtgccagccacttccccaggttctagatatacaacaatgaataacacagctcctgccctcagggagctcatttcctgcttttatatttgcccatttacttgtctaaggggggtaggaactcacctggactgccagaggacctcaggactgatgggtggcaccaggcggggtggctgtccaaagccatcacatggacagtctttgcaaagtcctggtgcagatcctaaacgtcacccctccaacaactgagattaaaggtatagcagaaataatttgtaaatgttattcaaaaccacatttagaaggaacctgaatattctcgccatttaacttctcacctacagaagctatttttattgattgcagaatcaagatacaatttatagataatttatgaaacatcctgaacttcagtaaatttacttttaaga

SEQ ID NO: 6 - DNA, 10870 bp, Homo sapiens
  modified_base (1001)..(1001): n is c or t
  modified_base (4876)..(4876): n is t or c
  modified_base (6762)..(6762): n is g or c
  modified_base (9125)..(9125): n is g or a
  modified_base (9569)..(9569): n is t or c
  modified_base (9871)..(9871): n is g or t
tcactgggctcacgtgtgtgtgagtcccacaggaattgtggaatgcctctttctcttgttgggtccagacatttagaatgaataaattaaagggtagtggtaacatggtcattgtcattgcagacaatgtggtatttatatatgggcactagctgtctttctcatggggctcaggaacaagggtaagtttgatctttcatcatgaaccactggggtgttctttatacacagaggctgtaccagctgaaaatagcccaaacatcttgtaattttgtctttcccaatttttgcctattcatatcccagaataaaagagcctgttcagcctttccaaagatttaaagaacattatctatttgctttctaagtacccaaaaagcacaaccgtctacattcaccttggctggatgaggacatgcattcattcatccattcaagagatatttattgccagacctggtggctcacgcctgtaatctcggcactttgggaggcagaggtgggaggatcacttgaggccaggagcttaaggctagcctgggcaacatagcgagaccccatctctacaaaaaataaaaaattagctgggcatggtggtatgtgcctgtggtcctagctacttgggaggctgaggtaggggcattgagcctaggagttcaaggctgcagtgagctataatcacaccactgcactccagcctgggtaacagagtgagaccctgtctcaaaaaaaaagaaagaaaaagaaaaagaaaaggggtatttattgaacacctactatgtttcaggcactgtgctagatcctaagtgaatatcagcacatgaacaagacaaaggcgaaaagttaccaaacaagtctaagttgatttcggtatatgcatcttcctgacttctggtcccgtgctttgaccacaacccttcaccactagaccagacttccccaaataaacaactacttctgcatgctggggatgggctgtgtgcggcagcatttacgtaggnggtacagacagcagcctttcacttaatgttgcaataacaccaggctaaacaatgtgcactgacttcaaaagtgtggggtcaggtctccttcaagtgccacagggagagtgcaaagtaggaaaagtctatcggatgaggaaacactgtagagggaaagtgaattttttttcaatttgggttaaaattcagatgtggaattctaccctccttttcacttttggatccccagataggaggaactcagcacatagataatcatgaactacacacattttggttttatatgctcagacttgtccagagcatgaaatccctgccctgttggaaggcagcgccgtgctcacggaggcacacaagcacctgtctcaaagtcaccctgacctgcagatctgcaaatggcaaaaataatttcacatgtttgttctgatttgtcttcatttttaggctaccttgtgtgagctccactttttagaatgtgattttgcagtcctgaaatggataccatgagcagattgagatgtgagaatatgttagaatgatcacaggttcggatgttagtggggcaggagagggagtctgagattgtattggcctatactgtggcttctggttgagcacttggtttgcctggatgatgctctggccttactcaatctttatcattccattatccagaggacagaggatctgagccccatctctgtattgcagtcacctcctctgggacctgtttccaagccttcttctgtgttgcctggcacccctttcttacctctttcaaaccacttactgctaccctgtaagctcgattgacttgttggtcttcctatgagactggaatctctctgagggtcgggacaggcctaccctcttcattacagtgagcaccagcctccagcccagtcaatagttttgttaaataaataattgaacaaaattatttgttaaataatggtttgtcctttccagaggatggacttagtttgtcctttccagaggatggatttagtaagtctccaactctggtcataatggtgccagaaggaaagagttaagctatctggaggaaataggctcactcaaagacccttcttcttttttttttttttaattggcaaaggcaggataagtgtatttgagataaatcctggatataaaatcttgacacatcttttaggtattggccgagatgctttggacctgaaagggaagtaaatcaaatcattctaggttttcttttcttttcttttggagacagaatcttgctctgttgcccaggctggagtgcggtggcacgatctcggctcacaggaacctctgcctcccgggttcaagcaattctcctgcctcagcctcctgagtagctgggactacaggcgtgcgccaccacacccggctgttttgtatttttagcagggacagagtttcaccatgatggccaagctggtctcgaactcctggcctcaagtgatccacccgcctcgggctcccaaagtgcaggaattacaggagtgagccaccgcacccagtcaggtttcctgttaagtggcctgagatctagttgtgaatggcagtcatggccagactcaggaattcaaagcttgacctattttgtctgaagctaatattaataataagagagatgtatttggcttcataacccctttccctcccgtccccctctttctttctgtaatcaaggatagaattagaagtaccgaaggccgcagaattgctttaggattcagagcagctccaaggaatctgtgtttacgtattatgtgtgtttttccgtttccctccctttttatgagtgagaaaaaaaagcgcctaaattcccaccaacataaaccaatgacatacaatgatgaaattctgttttcacctctgcctgtgacagggaatgcaaaaatagcaagtggcccagttccacgaatccccgcctcctgccctccccgctcctgccgggttggatctctaagaatggaggttagcgcacagcctcgcgcgggccgctcagcccccggacccggcggatgatgtcaggcgacgggagcggccgcggccgggccggggaggccgcggcccaggggagctgggagggagggtggcctcgccaggccgacggcgcgcccggccgcgcggcgttgcctggagacggccctggcggcgctgtgttgctgtaaacagccgcttccctgttactatctatagcaggatctcctggctcccgggcgcggcggctggaggcaggtctgcggtccggctccccgcgcgccccgaactatccgcccgccggcctcatcctgcctcgcccctctccaggtgcccaccgcgggccccgacccccgggcccgaagagtggagaagggaagaccggggctgtgcggggacatgcgtcttcgcgccctggaggtggccagcgcgctggggctgagccccggcagcgtgaccccggctgtcctacgcagcagggcaggagattggggggcgtggcacactctggagcaccttgcctccccaaagccccgtgttccaggacgtggagccgctcctggggtcccagcagtcgaggtattccgcccaggcgcagctggacactgtccttccagcccccgtcctccaccctccaagtccgcgctggaaaatcacccgctgcgggctcccgtaagcacagcttcctggcgggaccgaaccagccctcagcgcagatttgagttccccgcaggaagcacaccccgccttgtcatcccgaactgaccaccctgcccacataaccacacctcgcactccctacccctggggcccagctcagaaccgggcagacacccccttcaaatgtcttcgcacgtaggttttgcacagtgtttatctgctggtgtctcagggatttgacagtttccttaatattcccacacatggccgagaaaaataaataaataaatgcgctgtcttctttaaaaaaataaataaataaagtacccagtatcgtaaagtaggttatcgtattctcttattttggatcctccactttctgcttccaaacgcaggaacagtgctagtattgctcgagcccgagggctggaggttaggggatgaaggtctgcttccacgctttgcactgaattagggctagaattggggatgggggtaggggcgcattccttcgggagccgaggcttaagtcctcggggtcctgtactcgatgccgtttctcctatctctgagcctcagaactgtcttcagtttccgtacaagggtaaaaaggcgctctctgccccatcccccccgacctcgggaacaagggtccgcattgaaccaggtgcgaatgttctctctcattctgcgccgttcccgcctcccctcccccagccgcggcccccgcctccccccgcactgcaccctcggtgttggctgcagcccgcgagcagttcccgtcaatccctccccccttacacaggatgtccatattaggacatctgcgtcagcaggtttccacggcctttccctgtagccctggggggagccatccccgaaacccctcatcttggggggcccacgagacctctgagacaggaactgcgaaatgctcacgagattaggacacgcgccaaggcgggggcagggagctgcgagcgctggggacgcagccgggcggccgcagaagcgcccaggcccgcgcgccacccctctggcgccaccgtggttgagcccgtgacgtttacactcattcataaaacgcttgttataaaagcagtggctgcggcgcctcgtactccaaccgcatctgcagcgagcaactgagaagccaagactgagccggcggccgcggcgcagcgaacgagcagtgaccgtgctcctacccagctctgctncacagcgcccacctgtctccgcccctcggcccctcgcccggctttgcctaaccgccacgatgatgttctcgggcttcaacgcagactacgaggcgtcatcctcccgctgcagcagcgcgtccccggccggggatagcctctcttactaccactcacccgcagactccttctccagcatgggctcgcctgtcaacgcgcaggtaaggctggcttcccgtcgccgcggggccgggggcttggggtcgcggaggaggagacaccgggcgggacgctccagtagatgagtagggggctcccttgtgcctggagggaggctgccgtggccggagcggtgccggctcgggggctcgggacttgctctgagcgcacgcacgcttgccatagtaagaattggttcccccttcgggaggcaggttcgttctgagcaacctctggtctgcactccaggacggatctctgacattagctggagcagacgtgtcccaagcacaaactcgctaactagagcctggcttctccggggaggtggcagaaagcggcaatcccccctcccccggcagcctggagcacggaggagggatgagggaggagggtgcagcgggcgggtgtgtaaggcagtttcattgataaaaagcgagttcattctggagactccggagcggcgcctgcgtcagcgcagacgtcagggatatttataacaaaccccctttcaagcaagtgatgctgaagggataacgggaacgcagcggcaggatggaagagacaggcactgcgctgcggaatgcctgggaggaaaagggggagacctttcatccaggatgagggacatttaagatgaaatgtccgtggcaggatcgtttctcttcactgctgcatgcggcactgggaactcgccccacctgtgtccggaacctgctcgctcacgtcggctttccccttctgttttgttctaggacttctgcacggacctggccgtctccagtgccaacttcattcccacggtcactgccatctcgaccagtccggacctgcagtggctggtgcagcccgccctcgtctcctctgtggccccatcgcagaccagagcccctcaccctttcggagtccccgccccctccgctggggcttactccagggctggcgttgtgaagaccatgacaggaggccgagcgcagagcattggcaggaggggcaaggtggaacaggtgaggaactctagcgtactcttcctgggaatgtgggggctgggtgggaagcagccccggagatgcaggagcccagtacagaggatgaagccactgatggggctggctgcacatccgtaactgggagccctggctccaagcccattccatcccaactcagactctgagtctcaccctaagaagtactctcatagtttcttccctaagtttcttaccgcatgctttcagactgggctcttctttgttctcttgctgaggatcttattttaaatgcaagtcacacctagtctgcaactgcaggtcagaaatggtttcacagtggggtgccaggaagcagggaagctgcaggagccagttctactggggtgggtgaatggaggtgatggcagacacttttactgaatgtcggtctttttttgtgattattctagttatctccagaagaagaagagaaaaggagaatccgaagggaaaggaataagatggctgcagccaaatgccgcaaccggaggagggagctgactgatacactccaagcggtaggtactctgtgggttgctcctttttaaaacttaaggggaaagttggagattgagcataagggcccttgagtaagactgtgtcttatgctttcctttatccctctgtatacaggagacagaccaactagaagatgagaantctgctttgcagaccgagattgccaacctgctgaaggagaaggaaaaactagagttcatcctggcagctcaccgacctgcctgcaagatccctgatgacctgggcttcccagaagagatgtctgtggcttcccttgatctgactgggggcctgccagaggttgccaccccggagtctgaggaggccttcaccctgcctctcctcaatgaccctgagcccaagccctcagtggaacctgtcaagagcatcagcagcatggagctgaagaccgagccctttgatgacttcctgttcccagcatcatccaggcccagtggctctgagacagcccgctccgtgccagacatggacctatctgggtccttctatgcagcagactgggagcctctgcacagtggctccctggggatggggcccatggccacagagctggagcccctgtgcactccggtggtcacctgtactcccagctgcactgcttacacgtcttccttcgtcttcacctaccccgaggctgactccttccccagctgtgcagctgcccaccgcaagggcagcagcagcaatgagccttcctctgactcgctcagctcacccacgctgctggccctgtgagggggcagggaaggggaggcagccggcacccacaagtgccactgcccgagctggtgcattacagagaggagaaacacatcttccctagagggttcctgtagacctagggaggaccttatctgtgcgtgaaacacaccaggctgtgggcctcaaggacttgaaagcatccatgtgtggactcaagtccttacctcttccggagatgtagcaaaacgcatggagtgtgtattgttcccagtgacacttcagagagctggtagttagtagcatgttgagccaggcctgggtctgtgtctcttttctctttctccttagtcttctcatagcattaactaatctattgggttcattattggaattaacctggtgctggatattttcaaattgtatctagtgcagctgattttaacaataactactgtgttcctggcaatagtgtgttctgattagaaatgaccaatattatactaagaaaagatacgactttattttctggtagatagaaataaatagctatatccatgtactgtagtttttcttcaacatcaatgttcattgtaatgttactgatcatgcattgttgaggtggtctgaatgttctgacattaacagttttccatgaaaacgttttattgtgtttttaatttatttattaagatggattctcagatatttatatttttattttatttttttctaccttgaggtcttttgacatgtggaaagtgaatttgaatgaaaaatttaagcattgtttgcttattgttccaagacattgtcaataaaagcatttaagttgaatgcgaccaaccttgtgctcttttcattctggaagtcttgtaagtttctgaaaggtattattggagaccagtttgtcaagaagggtagctgctggagggggacacaccctctgtctgatcccttatcaaagaggacaaggaaactatagagctgattttagaatattttacaaatacatgccttccattggaatgctaagattttctactgcttctggggacgggaaaccgctgtgtaacagcttttgtgggaatacattttttctgtttcagtactcgcagggggaaatatttaaattttgttgtgctaatattaaattcagatgttttgatcttaaaggaaccctttaagcaaacagaacctagctttgtacagactattttaactttttattctcacaaaatcacgtggagggttattctacttcaaagatgagcaaattgaagaatggttagaataaacaactttcttgatattccgttatcggcattagaatcttcctgctcgttatcgtatccagcaggctgaactgcctcttgatacttggttaaaaaaaattttcaggccgggcgcggtggcccatgcctgtaatcctagcactttgggaggccgaggcaggcggatcacctgaggtcgggagttcgagaccagcctgaccaacatggagaaaccccgtctttactaaaaatacaaaattagcctggtgtggtggtgcatgcctgtaatcctagctacttgagaggctgagacaggaaaatcacttgaactcgggaggcggatgttgcagcgaactgagattgcgccattgcactccagcctgggcaacaagattgaaactctgtttaaaaaaaaaagttttcactaatgtgtacatttttttgtactcttttattctcgaaagggaaggagggctattgccctatcccttattaataaatgcattgtgntttctggtttctctaataccatatgcccttcattcagtttatagtgggcggaagtgggggagaaaaagttgctcagaaatcaaaagatatctcaaacagcacaaataatggctgatcgttctgcaaacaaaaagttacataatagctcaagaaggagaagtcaacatgactctgaacaagctttaacttagaaactttatcatcttaaggaagaacgtgacctttgtccaggacgtctctggtaatggggcacttacacacacatgcacacgtacaaaccacagggaaaggagaccgcccttctgcctctgctcgcgagtatcacgcaggcaccatgcactatgttttcacacacactgggtggaagaagagcttcagcgccagtcttctaatgctttggtgataatgaaaatcactgggtgcttatggggtgtcatattcaancgagttaaaagttttaattcaaaatgacagttttactgaggttgatgttctcgtctatgatatctctgcccctcccataaaaatggacatttaaaagcaacttaccgctctttagatcactcctatatcacacaccacttggggtgctgtttctgctagacttgtgatgacagtggccttaggatccctgtttgctgttcaaagggcaaatattttatagcctttaaatatacctaaactaaatacagaattaatataactaacaaacacctggtctgaaataacaaggtgatctaccctgnaaggaacccagctggtgggccaggagcggtggctcacacctgtaattccagcactttgggaggctgagacaggaggatcactggagtccaggagtttgagaccagcctgggcaacatggcaaaacccagtgtgcttctgttgtcccagctacactactcaggaggctgaggcaggagtatgacttgagcctgggagggggaggttgcagagaactgatattgcaccaccactgcactccagcctgggtgacacagcaaaaccctatctcaaaaaaaaaaaaaaaaaaaaaggaacccagctggttcctgtaggtgtgcaataataacaaccagaggaagaaaaggaagacgatttcccagatgaagaagggcagctggaccttcggacattgacctgctcctggggacctcaatcatggtccctgtcagccccatgcttactctagagggtgagcattgctttccctttgacagccctggccaaggcccagacacagacccttgctctagcttattgcacagcccagtggagaccaggctgctacatcaagatggcgttaaaggtccagaaagaggaaatcagagaccatcggatccccagggttgacatcccaccaagcttcctgctgaccactttcatgggcttgagagaagaaattccttcctcctttctccagctaaatggctccttccaaatcccttttactcactcaggactggacaactctcagggattattaactctgggaaattttttgtttttgttttttgtttattttttttgttttttaggcagggtctcgctctgctgccatctcggctcacttcaacctccgcctcccggcttcaagtgattctcctgcctcagcctcctgagtagctggaattacaggcaactgccaccactcctggctaatttttgtatttttagtagagacagggtttcaccatgttggccaggctggcctcgaactcctgacctcaagtgatccccccaac

SEQ ID NO: 7 - DNA, 131557 bp, Homo sapiens
  modified_base (561)..(561): n is t or g
  modified_base (1758)..(1758): n is c or t
  modified_base (3078)..(3078): n is c or t
  modified_base (3408)..(3408): n is g or a
  modified_base (15415)..(15415): n is t or c
  modified_base (26657)..(26657): n is g or c
  modified_base (28324)..(28324): n is g or a
  modified_base (29448)..(29448): n is g or t
  modified_base (38573)..(38573): n is c or t
  modified_base (53395)..(53395): n is g or c
  modified_base (54311)..(54311): n is c or t
  modified_base (63525)..(63525): n is a or g
  modified_base (64195)..(64195): n is a or g
  modified_base (107997)..(107997): n is g or a
  modified_base (119940)..(119940): n is c or t
  modified_base (120477)..(120477): n is g or a
  modified_base (121616)..(121616): n is t or g
  modified_base (122606)..(122606): n is g or a
  modified_base (125843)..(125843): n is g or a
  modified_base (127793)..(127793): n is g or a
  modified_base (128347)..(128347): n is a or g
  modified_base (129053)..(129053): n is g or a
  modified_base (129549)..(129549): n is g or a
  modified_base (130762)..(130762): n is c or t
agaaaagatggaatcctgtttcagaaccagcatgcatagttgtgcagattgtatactgtaccatgcattagttgaggcattcatgcaagagtcaacttgtgtattaggacagtttctggctgatggcagtaaagtgtctggaggaaggagcagctatttctgtttttacaaagactttgtaggggctagcagtagtactgtggcctatattttcagtttctatttacaaatgagtacttgttgaagtgattgagaagaatgtgtacatgatatctcattttatgtgatattactgcatactgtagcactcacttattggcaacctcagttatctgtaacagagtccacagccaaaataaagtaaaactgggccagtgaagtgaaaataaattgtacagtttatgaacatcatattttacattaaaagagtctgttaattctatatatgcagctctagcccatttatctgttttccagtgcaataatttaaaagcagcaagtagaggggaggagactgctagaattaaatagctggcagaagcagtgagtgagagctgacanccaggtgaccaatggtagagaaagaaaatttaggaaaggtagacataagagcccaaacaaacacaaaactaccatagattggtttcaggttaatagatgaagatgcatttctagctcagaagtatcaggggagagtactgttttgctgcaaaatgtagtcaatgatattcttaatactgatcctgagtcatcacaaaatgttaaatgagatatacaaaatcctctttaatgaaagaagtttgtaatatattttaaaaagctttttctcaactaaaatttcaaatactgtggatgcttaaagagatttgaaggcctgggtagcatctacttaatgaagtgtgctgcttagatatctttgttacctatcgatttctcctatgtggaacattactttttctaaagatgccagataaattatgtttttgtggtctgatcacatttaggaatcttggtttctaaaaaaggggcttggggtaagtaagaatatgaaaataaggcctggcgtggtagcacacacctataatcccagctctatggggaggctgaggtgggaagatcacttgaggccaggagatagagaccagactgggcaacatagtgagaccaaaataaaagtgaaacaaatagctgggcatggtggcacatacctgtcatccttgttacccaggaggctgaggtgggaagattgcttgagcccaagagtttgaggttacagtaagctacaatcgcaccactatactctagcctgggcaacagagtgagaccatctcttaaaaaaaaatttgctacagattttccgtttgtagtatctaacatatagtaaacactcaaatatttgttgtcttttgaggtacttaattcttgcttaaaaaaaaaaaagtagcttatctgacctaaaattttaacatgtgaaaatttgtggttgaaaaatctctgggctgggtggggtggctcatgcctgtaatcccagcattttgggaggctgaggcaggaggatcatttgaggcatggggtatgagaccagcttgggcaacatagcaagactccgtctccactaaataaaaaaagaaattacccaggcgtggtggcgggtgactatagtcccagctactcaggaggatgaggtgggaggatcacttgggcccaggattgaggctgcagtgagtaatgtacatgtcactgcactccagcctggangacagagtgagaccctgtctcaaaaaaataataataatctcttgacttgtaaaaatattatattttatattgaattataggctgaagactttaagtgacaagtcaagagaagcaaaagtgaaaagcaaacccaggtaagcttgtgctaagattttaacttaactgtgacttaaatttcatacaacttttggtgtattcacaattgtgtagttatattaatgaaccttagatttgttgagtgcatctgactacaaaataatttatcgattctttctaaattttgtaacaggaaaattttctaataaaatcgtgaaatggttgaaaaaatggtgaagtataattgttttactctgacagtcaatgagtattatttgatcacaattagtcatttttaatttgtataagagcaaaagtaaaagtcctgaattattgaaaagcaaattaatgatgaaatactacttggcaaatgagcctcttcagctatgttacctgttttgtatgaaaacaccaggattgtgctgtttgtccatttttttaataaagtaaagcatgtgaccagatttcattttcaacctagaaatgaactgtgatcttacatatttgttcttatccaacattatattaaataatttattgtatgctgaagagaatctctggggcaaaatgatggttgatagtgtgttacatacagtacattaactctgaaataaaacacatttctctaaaagtttaataattgtcattagtgattttaaaatatattacaattgacaatgtcaaaattcttgtatgtacctttttttttttttcagttggctaaatcaagaacagttttaataagtgtttcttttgggcaggactgttccatttttgccaaagtactctgctggattagaattacttagcaggtaagtgtttcatttgtagaggaaggttatacttctgacttttttactgaccaaaaatatcttttaattttgtaggttaaaagccttaaaacagctaaattttatcttaatgcagtgattggaaattatttatgtattattttccttgagggctttcacttttcactcattagtacaaagtccattcaaactttgagcagacagatcactattgtatttacaagtcaatactttatgataatatgtacggcttctttattacaagaaaattgattctggatttgagtccccaataattttgtttttttgctttgattcttatgtcatttcttttccaatccattcttttattgacatggagtttaatattaaaatgtatggtctttttagatataacatcaaaagcacaaanaacaagataaaaattagacacaatggacttggtcaaaatcaaatacttttgtgtgtcagagaacaccatcaagatagtggagtgacaaaacatagaatgtgagaaaatatttgcagatcatatatatgaggaacaacatgtatccagaatatataaagaacttttaaaacttaacaataaaaagacaaccccatgaagaaataggcaaaagagttgaatagacatttctcaaaagaagatatgcaaacgaccgataagcacatgaaaagatgctcaacgttgtcagtcttcagggaaacgcaaatcaaaaccacaatgaggccggtcgcngtggctcatacctataatcccagcactttgggaggctgaggcaggcagatcacttgaggtcaggagtttgagaccagcctggccaacttggtgaaaccctgtctcttactaaaaatacaaaaattagctgggcctggtggtgcatgcctgcaatcctagctactcggggctgaggcaggaaaatcactggagtgcaatggtgcgatctcggcaggggttgcggtgagccgagatcgtgccagtgcactccagcctgggcaacaagagcgaaactccatctcaaaaaataaataaataaatacagtatatggttaaagtatgtcattatacatatttctgtgcttactaatgtgccatttgacagatgtgtggtaaagatgtatgtgggagagggtatgctgcttttccttatctgtatttgttatgacacaatcactgatacctacattttcctttctcctttctagttcttcattaggtttctttttatggttgctaaatctagagatttttcttctctgaagtgaaaagtgcttaatatgatatttgcttcctttgttttgttgtgtgaagaacagaaatgaacatgaaaggaagtgtagtacaaattaatcagtaatgtattgtttactatttacattttatctttattttttctctagaaacttagttgaaataacttcattttactgaaaaatttatgttagagctatcaactttttgtgtggtacattttttggggatagggttgcattttaggagttaatatagaaaatttacatccgtaagacggtgtcaataatgtgtttatacatcgcactgaaacagtcttttcccattggaactaaaattgaatgtgagaaagaccattttaaatagcaaatgtttaaatcatatttttaattttaaaaatgtaatatacatagcataaaatgtatcttaaccattcttaagcttagtagtgctgagtacgttcacatggttgtgcatccaatcccaaaaactcttttcatcttgcaaaatggaaactctgtacctgttaaccaacaactctcatttctactccctcctctccatcccaggcaaccatcattctatttgctttctctgtgaatttgactattctaggaacatcatataagtgcaattataaagtacttttgtgtgtgaccggcttatttcatttagcataatgttttcaaagtttatgttgcagcatgtgtcagaattttctttctttgaaaagctgaatattctattgtaagtatgtaccatattttgtttattcatctgttgatggacacttgagttgcttccactttttggctgttctaaatactgcttgctgctaggaacatgagtgacaagtacctttttgacaccttgctttcagttcctttgggtatatacccagcagtagaattactggatcatacggtaattctgtgttttattctttctggaaacaccatactgttttccatagtgactgtatcattttactttcccatcagtattgtataaaggttctaatttcttcctatcctcaccaacgctcgctattttcttgttttttattatagctactctaatgagtatgaggattttcccctgtgttttcttctaagagtttttcttgtcaagattgttttggctgttgaaggtcatttgagatttcatatgaattttaagatgtattttctattgtttgcaaagaatgtcattggggttttgattgggattaaattgaatctggtcattttgcttattacagataacaatgttaagtattccaatccattaacatggagtgctttttctatttattgatgtcttctttaatttctttcagtattgtttagtagttttcattgtatgagtctttcatcatctttgttaattcctaagtattttttgatgctatcatttatgaaattgttttcttaattgctttttttgaattatttattggtagtatatagaaacaactgacttaattgttgtgtgttgatttaatatcatactttgctgagttcctttatcctgatagttttttgtgtggaactttcagggttttctgcatataagatcatatcatttatgaatagaaatcattttgcttcattcattccaatttgaataccttttatttcttttttcttgcctaattgctctggctagaccatccagtactgtgttgaatcgaagtggaaaaagcaggcatccttgtcttgttccttgtcttgatcctgatcttacaggaaaagctttcagtctttcaacattgagtataatgtcaactatgaatttttattatgttgagattgttcccttctactttagtgtttttatcatgaaaggatgttgaattttgtcaaataacttttctccatgaattaggatgaccatgtgttttttcctttcgttctaccaatctgtcatattattacattgacagattttcatatgttgagccattcttgcattccaggaataaatccctcttggaaattgtgtataatgcttttaacacagtgcagaatttagtttgccagtattttgttgaggatttttgcattagtattcataaggggtattggtctgtagtttccttttcttgtatgcctttggctttggtatcagggtaatgctggcttgtagaatgagttaggatttattccttcctcttcattttctttttaaaaagattttgagaatggtcaatgttggttcttttttaaatgtttggtagaattcaccagtgaagcaatcaagtccagggtatttcatcttgaggttttttattactgattcagtttcccatttcttcaggattcagtcttggtatgttttgtgtttgtgggaatttgtccacttcagctaggttatacagtttgttagcatacattgttcatagcactctctcataatcctttttatttctgtaagattcgtagtaatagtcccacttcattatggttttagtaacttgagtctttttttttttcttagtcaatctaggtaaacatttgttaattttgataatttaaattggtttatcttcaatcatgttgattctttcttctcaaatgtgcttttgaactcctccagtgaattattcatttcagttattatacttttaatctccagaatttcttattggttcctttctgttttatatctaccattggtagatataaacggtagtggtattgatgttaccattttgttcatgtatcatttttcacatctgactggcatgagattgtatgtatctcatttggttttaatttgcattgctctgatgattagtgatgctgagcatttttttcatctttgttggcttcttatatgtcttcatttgagaagagtctattcatatcctttgctcactttttaatggggttgttttttcttgttcatttgtttaagttccttatagattctggatattagtcttttgatggatgcatagtttgcaaaaactttctctcattctgtaggttgtctgtttattgtgttgtttcttttgctacgcagaagctctttagtttaagtcccatttgtcattttttgtcacaattgtttttgatgtcttagtcataaattatttgcttaggccagtgcccaaaagggtttttttctaggttttcttctagggtttttatagtttgaggtcttacatgtaagtctttaatcttgagctaatttttgtatatggtaagaggtaggggtccagttttgttcatccataaatggctagccagttttcctcgcaccatttattgaatagggtgtcctttccccattgtttatttttgttgacgttgctgaagatcagttagttgtagctgtgtgactttatttctggattctctatcctgttccattgatctgtgtgtctatttttatactagtactatgatgttttggttactgtagccttgtagtatggtttgaagtcaggtaatgtgatgcttctagatttgttctttttgctttggattgctttggctattcaggctctttttttgattccatatgaattttagattttttttttctgattttggggaaaatggcattggtaatttgatgggaattgcactgaatctgtagattgctttgggcaatgtggttattttaatgttattgattcttctaatccatgagcatggaatgtttttccattcgtgtcatctatgatttctttcatcagtgttttacagttctctttgtagagatctttcacttccttggttatatatactaggtattgtatatgtgtgtgtgtgtgtgtgtgtgtgtgtgtctattgtaaatgagattgagttcttgatttggttctcagattgaatgttgttggtgtataaaaatgctgcagattttatttttatttattttttaatttttattttttagtttctcaaatgagttgatgctgtggagttttgtacattgcttttgtatgttgaaaagttactgaagttgtttatcaggtctatgagtcttttggaggattctttagggttttctgggtatgtaatcatgttgtcagcaaacagagataattaatttgtcttcatcttttcctatttgggtaccttatatttctttctcatgcttgattgctccagctaggacttccagtattatgttgaataggagtggtgagagtggacatccttgtcttgttccagttcttagggagaatgctttcaactattgcccattcagtattgtgttgactgtgggtttgtcatatatggctcttagtattttcaggtatgttcctttgatgccttgtttgttgaggattttcgttatgaagggatattgaattttatcgaatgccttttctgtgtcttttgagaagattatgttatttttgcttttaactctgtttatgtggtaaatcacattcattgatttgtgtttgttgaaccgtccttgcatccaagggttaaacccacttgatcatggtgaactatctctttgatgtgctgttggatttagtttgatagcattttgttgaggatttttgtgtctatgtttatcagtaatgttgacctgtagttttctttttttgttatgtcattgctaggttttggaatcaggataatactagttgcatagaatgaggtgaaggagaaatctcctctcttcaattttttggaatagtttcagtaagattggtaccagttctttgtacatctggtggaatttagctgtaaatccatctggtctagggctttttttggttggtagattttttttattattattattactgattgaatttcgtaacttgttattggtctgttcagaatttcaatttctttctggttcagtctggaaggtgatgtgtttctaggaattaatccatttcctctaggtcttctaatttgtgcacatagagatgttcttagtagtctctgatgatcttttgtctttctgtggtgtcagttatgatgtcacttttgtcatttctgatagtgcttatttgaatctcttttctttttttcttggttaatctagccagcagtctgtcaatcttgtttatcttttcaaatatctaactttttgtgttgttgatactttgtatggtttttttttggtctcaatttcatttagttctgctctgatcataattatttcttctgttagctttgggtttagtttgttcttgcctttctagttcttaaaagtgtggtgttaagttgttaatttgagatctttgtgtgttttggtgtagtcatggagcactgtaaattttcttcttaatactgctttttctgtatctcagaggttttggtatgttgtgtctttattttcatttgattcaattaatttttttttatctctgccttaatttcattgtttacccaaaagtcattcaggagcaggttgtttagtttccatatacttgtgtgattcttagggttcctcttggtatttattttgattttattccactgtggtctgagaagatgcttgatatgattttgattgttttgaatttattgagacctgctttatgattgagcatgtggtcaattttagagactgttcgatgcacagatgagaagaatgtatattctgtggtagttaggtggagtatcctgtagatgtccattaggtccattaggttgagagtctaatttatgtccaaacctttgttagttttgtgccatgatctgtctagtgctgctggtggggtgttgaagtcccccactgttattttatggctatctctctttttcggttctagtagtagtttctaaatctgggtcttgtgatgttgggtacatatatatttaggatacgatatcttcttattgaattgagctctttatcattatgttgtacccttctttgtctttttttttttttttaactgttcttggtttaaagtttgttttatctgatacaagagtagcaacctctgttctcttttggtttccatttgcatgaaagatctttctccatccctttattttgagcctatgggtgtcattacatgtgagataggtctcttgaaggtagcagaggttgggtcttgtttttttaatccaacttgccactgtgtatcttttaagtggaggatttaggctgtttcctttcaaggttaatattgatatgtgaagttttattcctttgatagtgttgttagctagttgctttgtggtctttattgtgcgattgctttatagggtctgagttttgtacttatgtgtgcttttatggtagcaggtatcattctttcatttccatgtttagaactcctttgagcatttcctgtaggtccagtctgatggtgataaattccctttgtgtttgcttgtctgggaaagatttcatttcttctttgtttatgaagcttagatgaacaggatataaaattcttggccagcaattttttttttaaggaggctaaaaataggcccccagtctcttctgactgtaaagcttcggctgagaagtccactgttagcctgatgggttttcctctatgggtaatttggcccttttctctagctgcctttatgatttttgctttcatgttgaccttagtctgatgactgtttgtctcggggatgtcatcttatatggtatctctcaggagtctctgaatttcttgattctagatttcagcttctctagcaagattggagaaattttcctggattattccctcaaatatgttttccaagttccttactttttcttctctcaggaatgctagtaagtgaaaggtttgtttgctttacataatcccatatttcttgaaggctttgttcattttttaaaaattcagttttctttatttttgtctgacttggttaatttgaatgactggtctacaagctctgtaattcttctgctttgtctagcctattaactatattttaaaattcctttagtaaattttagaattcaagcagttctatttgtttctctcgtaatatagctatcttgtctatcatgtgctgaatcagttttctggtttctttgtattggatttcaacttttttcctggatcttgttgagtttagttgcaatacgtattttttattctttattggtcatcctatacatttcagtttggttaggatccattgctagagagctaatgtgatcctttgagatgccagaacaccctggctttttgtactgccagagttcttgcattgattccttctcatttgaggaagctgtctctttttattttgaatttgccatcatttggatgtgacttttttttccttaagggtatggctgtggtatatgttgtgtattatcatttgcctttgtttctgggtgcttccacagagccaaatgctatatggggtccttggttatggatagcttctgtgtagtgactttctcagatgctgcttactgtagtgatgtattggctctaagaactgacacctaacaccttgtctcctgtggagctgagggtgtggagatcccagggggctcatcttgtggactgcctagcactaagcccttttttagcagatttttatttggtgatgcagttcaggctgcagtccagtagatggcatttaagagtaagagccggcaggtaggctggcgttgggtggaagcacctgccctgagtgggcaggggatggtggcgggaagagatcctgtggggtgtgctgaggtcttgggggagaaggtgggtgggtacacccactcctcattctgtgctggcaggaacgtgatccacttcctatcatgcccctgtcacaaggctcccaaccttcatttcataaagattttgtcctttggttcctggctgcgggttgcgggtacactcctctgagggctgccaccaaaatgggctcagggagagtctcttcctccagatgggagcagacaactctgcaacttgtcttcccttgctggggtgttgctgctctgtgtagggaaggggagttgggccctacccttcctgaaagcttgagctgtgcagggctcactttcagtagaggtggagccgctacaagatgcatgaaatacgctgtgtgtccgagtgcatgtgctggcccctggcagagagaacactgctgcatcagcaacagtgtagggggatgcaggagatgaccccttccccacatccattcctgggtaatgatacttcctcttgtagcagttggcactgtgcctgcatttcctttgtcccaaggtgtgcttttgatgggctgcactctcttccacttagggatggcccacgcagggggttagatctccagagatctcacagttacctggggaactgctggttccctgtgcttgccaaagttagagtggtctgtgaggtgtgtttgcagggaatctggtggtgtggtgactcaagggcagagaatccctgggcagggcagcatcccactgctggcgcacgacaagtatggtatctggcacctgagaggagtgtggacacgcatgtacacacgagttggccaccagattctccagccccaggaggttttcaagtcaccatcaatagtattgctttgggtcacaagggcagaggagcactctccaacagtttgatggtcaggagattgttggaggggtaaggggagcagagaactactcccacctaccctttccacagggctccaaggtccttgagggtcaatctctgccagagtcttgctgctttccttttctgcaccccagcttcttcccttgggcactctgacaggtcctggctcccttccctcagttttctgtctagaatttgtccactcaccagtaactttgatctattttttgagaaaaactggcttttgatattcctagtaagccatcttgggacaaaaacaaaaacaaaaacacgcacacacaccacaaaacaaaaaacaattgcatctgttattgaatgtcctagtctttaagtgtctggctctccaagagggaaaggggaacaaagaaaggggacaaaaccagacgctggccttttaaatcctctgaaaattgctagccatagcaggaggggtttgcaacagtagctgcctctgtgtctgcatctccctgattagaagcagcaattgtgatcagagcacagactccctgatgtttggagcacagggtccttattggcccaccttgactttcataagccgtgtacaagctacttcaggaacaagtgcatggctacctgtccaggggttggggtggtggatgggtagctgtcattgtgctaaaacctgaagtcgactgaaatgaacctcagtttaccctccaaaccttcccctggaagctgcaagcctttaatagattctagagtcccaaaatagttacatcagacagattctgccaatgtgattgtggtctaggtagggtgacagattctagatgcctcttactctgacatcttctctctatttcctaaatcataatgtttcaaagagtgtagtacaacacagtctacagttactttcctatattcctatagctctaatgctatataattagtcctttcctttgtctaccaagtaaggtaattatttacctgtgtgttcatcttcctaactgtattgtgaacacttccactagtcttcccatggtatacatagaatatattcaataacgatttgaatgcaagaattacacattatgaatgtggcttcttcatttcatcatcattgacttgtgatttttaaagacgtttgagtttgaacacagaaaaattgaaggagtttacatccagtgtctttatctcagtaaaatggagtaagttcatccatctgttgaaagtgattggatggggatgagtttcaaggcggcatgagatgtgtaatacctgctgtgtgtacttcagggaacaatctaatagcaataaattttttttaagtgctgattggcagctaaggcccatgcgaggttggatagcatacattgtaatggatttagtgcctttctccaaactgcttcatgtcgtaaaagtagagcagagaatatgaatggttgcgatagtctaggtttagagaatgctgaaaacagtaggaaaatcatgaatgaactaggtgctgaactaggaaagtagaaatgagggagggtgatgtataatggcaaggtggatgtgaaaagcatacataataacggggagaaaaggaaatggtgagatgttaggaaaagtgatctggagtctaaatttggcaagtgaggattaattttctctttcccactgagttaagaaaatgatagaaaattttaccacgaagtcctgaattttcaatttataattagtctatttcctcactcaacagacatttaatgtgtctcttgtttgttaggttctgtgctaactaccaggataacaaagatgcaaaagtaaaatttatatctcagcagttctggtgcctaacagtgcttagcatttagtaaatacttgttgattttaattgatgcttacataatctgatacatccaagaaaattttctagctttctgttagtcaacaatgacagcaggactgtattatttgtgtgaccttccaccttaattttcatcacatgtggactctagtatcacctggattattcagattgattttcttacttaaattcagtagaaaaattgtgaatctgactatgaggggaggcagtatgaactcattaaatatgtattcctgtttggagaaatattcgctggatagctagaattttagattgggaaatcaggttttacatcagcaatcaaatgaatagtagtttagaagttttattttttaacttctcattttgaaataatttcagatttacaaaaaaattgcaaaaatagaacaagcaatttcagctttcccagtgttagcatttcatataaccacagtacaatgatcaaaccagaaaattaacattagtaaataccttaatccataggccttattcagattccatcaattattccaccagtgtccttttttctgtactaggatccaatccaggatcacacatcatatttagtcacaatgtctcccttaccttctttaacattgaacaattctttagtctttgtctttcatgacctcagtactttcgaagagtactggccaaggctgggcatcgtggctcatgtctgtaatttcagcactttgggaggctgaggtgggtggatcacttgagtccaagaggttgaggctgcagtgagctgtgatcacaccactccagcccgcgtgacagagtgagaccctgtctcaaaaaaaaaaaaaaaaagtactggccaattatgtttcaaaatgtctatgaatttggatttttctatttccttgtaattaactgtaagttagtacttttttggtaagaataccagaagagtaatgttatatccttcccagtgcatcacatcaggaggcacataatgttgatgtgtctcattactgttgacattaattttgatcactttattaaggatgtgtctgccaggtttgtcctcagttaacactgttttctcacttttagttaatgattatccaatgggcagatacttngaggctgtgtaaatatcctgtttctttttgtgcttttacccactagttgtatcatccattaaaattctttttaaaacaattattactattgtgtttaccaattggagattttttttctcatcatttcttttaaaattactaattggggccaggcacagtggctcatgcctgtaatcccagcactttgggaggccgaggtgggtggatcaggagttcgagaccagcctggccaatgtggtgaaaccccatctctactaaaaatacaaaaattagcagggcgtggtggcacacacctgtaatcccagctactcgggaggctgagacaggagacttgcttgaacttgggaggtggaggttgcagtgagtcgagatcgcaccactgcactccagcctgggtgacagagtgaaactccatctcaaaaaaaaaaaattactaattggatttctattataaggaagagtttttctcttctctctcattgatttatttattcaattatttacatcaccatggactcagggatattgtattctttgagttataatctgttactaccattatgtattttgttgctcaaattgtcacagatttggccactggaagctctgtcaagttgacgtctgtgtccttgcaacatgtccccattattttttgagtgtttcctttctagcaccacaggatattccacattcatctttagatagtatttccttttaatgtgtggtttgcatttcaaattattttttgcttttttttaggtatgaggatacatgggctgcacttcacagaagagccaaagactgtgcaagtgctggagaggtaaagaattgactaatcttatactcgtggcaaactttcctttttcagtgctaaatggtattttttaaaaattgaatttataattgtttgtgtcaaaatgttttgcaggatatctgaaattgaatctagtcgttgattatgaaactccctgaataaagcacctttttatcatttctctgtcaagtaatttagtttagttgagcaagagagtttataacttttattctaaggacaggtaaatacttgttttatgtagatataatgctctgaattttagtctgatgaatttgcaatatatgtaaattataagacatctctttataccctatataagacatctctttctacactatttaagaattccttattatttggtcaaaaaaacttaactttgctcagtctatccaaaattattaatttgcctaacaaataaatacaaaaatttcaggggtcatcctcagttcacttagaagaacaaagtatttttaagcactagtgtcttgtaatttaaatgacttggtaaatgtacatagccaaaatcgaatactctcctcaatgttgttgatgtcaatcaaaccttatttttttctgaaatgatttctgtaattctgactttaaataaatttagactgattttctttaccatttacctaaattaatgaagctgtaatagttatatacaacacaggaatatatatgatgaaatgtagacactagcatttctcttagaacttactgataagaagaaaatgtaggtttctggtagtaaggcagaatagatactttgaaaagccctacagctataaaacacttaaatgttggatatattttttaaaagttctttaagatacattaagcccacaaaaattaagggaaacataaagggccaacaacaacaacaacacaacaaaacagaacagggaactgaaatcagagtcattaaaacaaaacaaaacaaaacatggaagtcgggatcaaaatactaaaacaaaagctttggagatttgtgggaataggagactttgtctgtggggatctgaatctgagacttttgataaagctctttggactttgaggtggctacatccccctggtgaaagcttaagctagggggaaaaaaaatgtacctgttggctaaaggagtcaacaaggaaacctgtctggcttcctaagaagttggcatagcctcgtttcttgatttgttaccatggtattggcctcataggagtatggggttctaagttatatttcctgcctgatcaaagaacctctaagttaagaaatgaaagagttggctgggcacggtggctcacacctgtaatcccagcactttgggaggccaaggtgggtggattacctgaggtcgggagtttgagactagcctggccaacatggtgaaaccccatctctaataaaaatacaaaaattagctgggcgtggtggctcatgcctgtaatcccaactactcgggaggctgaggcagaagaatcgcttcaacctgggaggcggaggttacggtgagccaagattgcaccattgcactccagcctgggtgacagaaactctgtctcaaaaaaaaaaaaaaaggtgcaggtaatttgtgttctttgacacccaacaaaaacaaatgcaaattctccatggatgaaactgtctaaacctaggtccctcagatttccacagattaaatcaggctccctgtcctcaaaatgttagcaatcacacaagtaaaccaccaaaagtttgagtcaccagaaccaaagtgtgagatttagacccataaaggactgtagatactgcactattgaatattgactgttaaatagttatatataaaatctttcaagagataaaagatggacttaaacgtgagtaaggaagaaggcactatcaaatattttaaagtcattgaaattacaaacccaaaagatgtgcttaacagcaatttgaggcagctgaagaaatagtgaggtacaagagagagtcaaagagtacacagaaaggatctcagaaagaaaatggaaaatatgaaagaagaattgataggcagagaatacttataaaaggtctttaggttgaaccaggtgagattgccaatattcgatgaatttttatctgtaaaattgcagtttcatatgagttagcccaacatatccagtaaacctaaatagttctagaaagagcatgagggaaagacagtgtaggaaaaacatgtctgagaattttccataaatgagatatgtaaatcctcagatccagaaagtacaacaagcaagcaagataataatccattcctagacacctcatactggagctacagaacccagttaggctcggtggctcacacctgtaatcccagcatttggggaggctgaggcgggtggatcacctgaggtcaggagtttgagaccagcctggccaacatggtgaaaccccatctctattaaaaatacaaaaattagctgggcatggtggtgtgtgcctgtagtccaagctattcgggaggctgaggcaggagaatcgcttgaacctgggaggcagaggttgcaatgagccgagatcatgccactgcactccagcctgggcaacagcaagactgtctaaagcaacaacaacaaaaactacagaatcctaaaggagaggagaagatcttaactagagagaagatagatcacttataaatgaatgagttccacagcagacttttcaaactgttgtcaagaattagagtaaaagcaagacatactcagataaaaacatttttctatcagcaatcgtccaataaaagaacttctaaagaatgtaattcaggaaaaaaggaaactcattttagaagatgggtctgagatgtaggaaggaatagtgagcagagaaaatggtaaacatagataaatctaaacagtgggacatatatattagttatctaatttgtggggttaaaatgatagaagaataatgctagataacaaagcatgtaagatggaaggcagattatcagcgttcaagcattctaacacttccgtattatttgggggaaatgtattgatattgattaacctcacttttaaaagttaattatggagggcagaatttcaagggtaaccacatacaaaaaaaatagaaagtggttgggtgtggtggctcacacctgtaatcccagcactttgggaggccaaggcaggcagatcacttgaagtcaggagttcgagaccagcctgagcaacgtggtgaaatcctgtctctactgaaaatacaaaaaattagcctggtgtggtggcaggcacctgtaattccagctacttgggaggctgagacaggagaatcacttgaacctgggaggcagaggttgtaatgagctgagattgagccaccgcactctaggctgggtaacagagcaagactctgtttatcttctaaactagtagaaaaaaactagaacaatgagaaagaattcagtcaatgcaaaagatgacaagaaaccagaggaaaatgcataacagtagaataaacagaataagatggtaaatgtgaatatatctgcagcctcaatatttttaaatgattaatctagattaatctaaagggcatattttgaaagacgaggaaaagtctattaatagtttataagttactgacaagagaaacacctagaacataggacacagaaagattgaatgtatgggcatacctcagaaatattgtcaatttggttccagaccactgcaataaagccaatattgccagaaagcaagtcacacaaattttttagtttcttagtgcatataaaagttatgtttatactataccattgtctattaagtatgtctaaaaaagcaatgtaataccttaaataaaaaatactgtattgcttaaaaaatgctgacaattgcctgagccttcagtgaatcataaccttttttctggttgagagttttgtttgtttttttttaatgtttatagctgccgactgatcagggtggtggttactgaaggttggggtggttgtggcaatttcttgaataagacagcgatgaagtttgctgcatctattgactcttcctttcacaaaagattcctctgtagcatgcaatgctgtttgatagcattttacccatagtagaacttctttcaaaattggagtcaatcaactcctcatccattcatgcttgatcatgagattgtggcaattcagtcacatcttcaagctccacttctaattcgagttctcttgctatttttaccgcatttggagttacttctgaagccttgaacccctcaaagccatccatgagggttggaatcaatttcttccaaactcctgttaatgttggtattttgatttcctcccatgagtcatgaatgttgtgtgatggcatctagaatagtgtattctttccaggagattttcaatttagtttgctcagatcaattgaaggaacttctatctatggcagctataaccttataaaatgtgtttcttaaacaataacacttaaaagttgatatgactccttaattcacaggctacagaatggatgttgcattagtgggcatgaaaacaatgttaattaacagttgcttgtgtgcagtaacttggcgtctccatgctggacacatataagccatgcatattagctgtcgatactctgttcatacagcctcagtgtgtagacaatttaaatttctaacaattatgatgttctaacaattgtatttgaaatgcaattcgagaatctactcacacgttgttttaaaatgtgtatcaagcttaaatataaagttttcctatatatataaaacttgctattgatatttgcaaggcttatgaatattggataataaaaggcattctacctgggagacattcttcaatgtatgcctatggtggcaaaccaaatccagcaatgtataaaaaacaaaatacacttagtttattccagaattaaaaggttaacttgacattagaaaatcttttacatgcaattgactcttaagtattaaaagtgaaaatgatcgtcagatgcagaaaatacatttcataaaattaaatacctattcagggtaaaaagttttagcaaatttttaatggaagacagcttctttgtcctgatatctaccaaaaacctgcagtgtttgacttgcagtattttaatcccatattcggccatcttgctaaattctcttattctattactttgtatttgggggtgcgagttgttttgggtagatggtaagtttgtttctttccttctaagccatacaacttttaatttttcatgtttcttatactgggtagaaactctagtataatgttgaataaaaatagttgaagaccttgttcacattttggcttcattagatttaaatgtgaaaaggaaaactatacattttttggaaaatggtagaagagaatatgtttaagaccttagggtgggaaagatttcttaagtaagatataaaaagcaccagccataaataagtacattgataatttttgtcaaaactttttttaatcaaacaacaccgtgaaaaattaagtgatttataagacagaggctaagtgttcagaaaatatgaataacccctataaaccaataaaaagaggatgaaaataacctaggagaaaagtgagtaaaagatatcagcaggcatattgcagaagagaaaacaggaatggccagtacacagtaaaatatgttcaaccttgcttggtatcaaggaaatgcaaattgaaaccccaaattttcactcattagattaccaaaaatttaagaagcttgagctttctgtgcagatggtcattatttgcagatgacagttttgtttctttcctcggaagaaatgtgatgataaacaactagaacttgggagtataaattagaacaatcacgttagaaaaaatgagttggcattaagtagaagttaaagttgcacatgcctttcaagcaacaattctgcttctaggaatttttccagagcattacatccaacctgcaggggctggggagggggatctcattaccctaggccctgggcaatgaggagatggatatcttggacacatctgcaattcatttgtgaaacccttgcacatgtgcaccttgagatttgtaccagaatgtttgtagcaagcttggtttaatctttggacagttccgaagtccatctgcagggaaaagtgtggtattattcataaaataaataccgtatacagcagtgaaaattagtgaactactacacctatatgtatcaatatgtatgaatcccatgttaaatgaagactgtgtcctatagaggagctttaacaacaatcattcttttgattattagaagcattaacaatatatacaggagaaagaatttcctgtcagatgtgttattgaatttgtgctacctcaggatcttaaatttttgtataattggttattgtaaaacccacagctcatcaaaagtacttatgttgctttgcagaaacagtacccagccttaaaaatgaaagtttattttaaagccttctgtggtgtattattgagatatatgtaaatatttaaatgtatatctttagtatgcatagtattaaacttgtcattttgtaaatttattttgtcagaccgctcatgtgtctttggtgggctttaccagcataacctcctggggcaaatatacttttggacaattccatcttgtttaacaaattattttatactcatctactttaaagctaattattataactatatagtcttagaattcagagcaatagtttataaaacaagcaactgtgatcaaaggtaactttgttgtttaggcttgttttctttttttttgagacggagtctcgatctgtctccaggctggagtgcagtggtgcgatcttggctctctgcaacctctgcctcccaggttcaagcgattctcctgcctcagcctcccgagtagctgggactacaggcacatatgccaccatgcccagctaatttttgtatttttagtagagatggagtttcaccatgttggccaggatggtctcgatctctcaacctcatgatccgccagcctcagcctcccaaagtgctgggattacaggcgtgagccaccgcacccagcctgtctaggctttttctaaataagggtttcgattttttttctcctttagcagtgtattaaaaaaataccataaatagttaatacttagggcttaaactctgagggcagttttctaaagttagactttcagtgttttgcctctcctgttattgtgaaatattagcttgccttcaaattgaactttcaagattcatggttttgtttaacagtttgacattaagccagttgaatttgactgtttcactgtcagaaagtgaactgaacgtagtgttggaaatcctggtttctgctccttgctgcacaaatacctgttgaccttgggcagataacatggcctctcttagttttctcatctataaaatggcttaacactacttattctgcttatcaaacttgtgtggaaatcaaataaaatgaagtgttccttaaaactctgaactgctgagttttatactaagatcctattctacatcattggtgtaccttttcatcattggtgtgctttttcttccttctcctaacctcaatatccagaaagaattttggaataaagcactatgggtttgtcttgctccttaaacttaatttcctgggggtgaatcttggtttattctgagttacttcgaggtggaaaaattgaacttccggagatagctttttttaatcattaagaaattacacatgataaaatgaataggtaacagtacagtttttcagaaccgtttcttttgctagatttttacttttcttcttccctttatatacccctatagcacaatccctagtaggttgattaagggcataggcttactgtcaaattccctgggatggaatctaagtccactgtggtccttaaggaagtaacttaacttcattacacctcaatttttaaaatctgtataatggaggttataatattgcttagtgtatagagttgctgtgtggtttaaatgagataatatatgtaaattacttagcacagggtctggtatttagaaaatgttcaaaatgttttagtattgtataattgttgataattattgataatttctgagaatctgtttacccttccattcttttaaatgatagtttagtgttttctgatatagtttttctacatatgcttatattctatattcagaatttaattttcagttttattgcaggtatgaactaaactgtagttaaatttcaatatttaaacattgcactttaattttcagtaagaaatggttaatatgtaatttttaatatctaaaattatttattctagagttttcaaattagaaaccaaaatagcccataatataggaatttttttttttagagtttaaaatctgaagttaagagaatttatgagggctgccactgaagtataaacaataagagggcaggaatcattacatcttcagtatccaaaatagggcttagcaaatagtgggtggtcagtggaagtttgtggaatattataaatgaattttgtgaacatagatccttgtttcaagctttggtttccttactgcattttagctgttttttcagtatgttttaagctacttttaaagattttttttaaagaccagttggcaacagacatttttaaatacacaaaaataatgagaaatgcggtttgcgtgaaacttgatgtggcctcccagctcagttgaggcttgaatgtgagagattatgtgtttatccctccagcgtgggctgagaaaccacagggagatgtgtcatagcttagttctttatttcaaatgagaattcctactatagtgaaatgtacgaacaaaaacaatctagtactacatacaaataattttgtatctttgatatattcattcctccaaagttctttcttaatttattaagtggaacttagtaagaatcagttgtattcagattctaactcttaaagagccttaatcctggccgggcacagtggctcatgcctgtaatcctaacactttgggaggccaagatgggtggattgcttgaggccaggagttcaaaaccagcctggccaacttggtgaaaccctgtctctactaaaaatacaaaaaattagccgggtgtggtggtaggtgcctgtagtcccaactactggggagtctgaggcaggagaatcgcatgaacctgggaggcggaggttgcagtgagccaagatagcaccactgcactccagcctgggcaacaagagcgaaacttcgtctcaaaaaaaaaaaaaaaaaaaaaaaagaaccttaatcttgagatgtacaaattgtctgttttgaatactcaaattcattttcttctgtcatataatgggttttgttacctttattttttatcgtacagattatggagttttttccacagttcttgcttattcatgttgatattttcaaaagatcacctcttcttgctccttctaagtctttctaggcccttgtccctcccactatgttaagaccaaaacagaattgtctgggagaaactaatgtctgtcattttctttatagtctttagcaaaagaagttagaattatcttaggctattctagaatttcacaaccttgctattaggaaccctttacatctgctgaattcctcattaacttaaatcatttcctctttttctggaattctggaattggccagtttcctcaaaattcctttatatactttatgcaataagtattcctgtttaaatgtaaattgaaacatggtatattctaaatgtattagggaacttttctttgaagacttcctttcgtaaagccaataattacccgttaattatgttttatgtttgttttctttttggttgttagtggtagttttttgtttttgttttttttttttctagatttagcttttcaaatacatggtctgcttaaaacagggtatacttagaagtgacttctgaagtcatttttaaactttctcttctgtgggttaagatgcactgatacaagcagtaattggaggtttcctgcactgaatattaagttgtttcttttctaaaaatgaaaacaacttcagtctcttttagaatgtaccgtaatctctactgagtagaggggttgttaaagataacattaaatctcattacgttaactgtactttctttgtgcctaaaacctggtttcactttaccccccttcttgtgtgctgcagctggtggatagcgaggtggtcatgctttctgcgcactgggagaagaaaaagacaagcctcgtggagctgcaagagcagctccagcagctcccagctttaatcgcagacttagaatccatgacagcaaatctgagtaagtccaatgttttcattntacattacttttaggaatgaaaacaacttgggcagggtttggtgtaatttcagagcttttcaggaacacatgaaattctgggttaacaggattttttggaaaatcatgatttcatattttgattagttgaggattccacagaaaatgatgtaaagtgtagaaattagttctgtttctgcctcaggtcagctccggacacataattataattatgttgattcttaaagtgactcaggttgtctttgttgacatttggtctctgtttaaaagcatacatatagaaaatggattaggtgactttgtccttactgtagaatgtattccagaaattgttgcttttaaaatttagatatgctagaacttcatgtcttgtagtgtatttttttctcttcaaacggattggagatcaaacaaacctggttaaatgagggtacttgtgctgggtgtggtggcacgtgcctgcagttgcagctattctggagactgaggcaggaggagtgcttgagcccaggagtttgaatccagcctgggcaacatagtgagaccttgtctcaaacaacaacaacaacaaagtaaattagggtacctgtttggctaaatttatactctgtggaaatttatttttttgtcgttgttcatttggatggattatgttggtattctttttttcttgggtttatattcagaaaattatcttttatgtttgatgatgccacatctaaggataatattgcagcttactatttcctaatcaagcttaagatcttagtaaagtaggaggtaggagctgtctgtatgagctaataacctgttttagtcttttaggtgggaagctaaagataccctattatctcctcctgtttttaatattgccttattcaaagcaaaacatgactgatttacaaggcaagtaattggcaagtcataagacagttttttgtgtgtgaacaaaatagatacgtagtatttggagtgctgttgctgataacagtagctaatgtttatagcacctactgtatgtcagagatgattagatgatttacagatactatctgtaattctcacaagaaccccacaaaagtagcttttattattcccaatttacagataaactaaggcttggagaggttgcaacttgctcagaatcataaaatttataaatgcatctaggattccaaccacattgatgatatcctcaatatcagtatgaggcagtaggatgaggtgatgaggcagtgggatgggagctctcagtaggtctctatgaactgtattcttcaagtcccctggctgttgccatgcctttcagggtcagtgttttgttatttctgaaggcagggcatggaaaagagattctgggtcttagaaaagtgtaaaatggctgtgattgccgtctgcattggtttcctcttacaggtatagtaatggtccttcccaagccttggacatagcctttaagatgttcggaacattcttcttagccactttctttcagctcatcttcctgtatctctttgagtcacttgcttttcattggttgtatgtttctttgcagacatgttctcttatgataacctcttttatttccccagctgagagtaaatctgtttacggatagttgttgtttgcttaataccactctattgattaaatgcattctgccacanttctcattattttcatagtcaattctgtttagaaaatgcagtctctataagtctttcatagaatatattgtatgttcgttcccaattaggattctaatatcctgaaaaatgtttgatgtttagtgacacatgaccttattcttcagaaactgcattttggcttcttaaatgcacaaggtaggccttccaaatgttcacttgaatcctctcttttttagtaatctgagaacatctaacactaaagacaaatgaaagctaaaacattatctgatatactgttctggttaatcactgctaaattaatttgagtcatttttttcctctcatctatgtctaaccgatattgagctctttttagagagttagttcagttttttttagaaggtatgtctggatggttgcttttcatatatattgccaatctgaattatctgttagcctttgaaatacatgcttcctttgggttttaatctattgctgttatttgcctgatatttataattagtaatgaatgactgtggaagatagcatatcaaaacttggaattttagagacctagttagtatttgttggcctagaataagcccagagagagttgttttaaaatcatgaggcttttagctaagcaatttaagctttatagaatcattgctgacgatattctttacagtaggaaaacaaacactttgaagccaaatttgatggagtgagttgtgtaaacatgtatctgtaccattaatgtactttatgaattcattttgatgcatttatgtatcagtcttagattttggaaacatttagtgttttaaatgcttactcatttactgggtttttttttttggaagcctcaaaatctctcctattattacccaaataccttgacataatattacaaagcttaaatagttaagcaataataaaaaataaaaacaaacttagaagaaaatggtaaccgattatatttagtcacagggtccccctaacttctttgaacttgttgccctttcactgtcaaatgtaacaccatatcctgtcagtccctccattttccaggctgcttcactcttttggtcttactttgctctctagaggccctgcttttattgaagggcaaaggatttatnttatgtgagcaatttggacttttgatgatgcttttagctgtgttatcccatggcttcattaatatggctcctggtacctagccccttgggaattgttaagttacaacagatgatccattcatattggcttcagtccagcttacaggagcctatttaattgatacttactggtaaggtttgtcgttttaaaaataagtaataagggtatgctgggaactggaaaacaagggctatgaactgacagatcgggtttggctcccaatccaacttcctcactttaaaaactgtgcagatttctcaatggctccaagctttagttttcttgtctgcaaaatgacgatgagcatacctgtcttgtaggtatttggaggattaaaggagatgacaaacgtaaccacttagcacagtgcctggtacatgctgggcatctgccacgcaccacgcactgcgtacagactctggacacacagcagtgaacaaggctgggcacctgccatcaagatgctgacgttctaatgggggcctctctagcctttgcgaattcacaaaaccattattctgtgacacgagggtttggatggatgttaggcagtttagcttgtgctgcaaaacagtttagaatgcaaaaccacaagattcaatgtggtgatattagtattctgtacattgaaggtgtgtaagcatacaatggaatatttttatccagattctatgcactttcttattctgtgaaaaaccacagtgctttttaatcataaaactggaaaaatatgtttgaaaagtatatactgaattatcttgaacttccactagagggtagtataatcctattcctttattgaagttcaaaatgttaaagccttgtctttgaattttctcttagtttattttatatgacctatttttaaaagactgttcccttcatctagaacagaagattctgggttttgtttttgttttaaaattttaatttttttaagagacagagtctcactctgttgttcaggctgtagcatggtgatgtgatcatagctcactgcagcctcagactattcctggactcaagcgatcttcctgcctcagcctcccaaagctctggcattacaggattgagccactgtacccagccagaagatgctgttaactcttagataagaattcttagatataagagaatagcagccgtatactgagtttgtgtttttcttttggtttgacctagcctgatacagtattattttgcttttttctgtacagaattttagagggcatctaacaaagagattatcatagctctgtcagtttttcatggactagattatcagatgtccaggttcctttctgaggctagacccttcaagaggcacattaattctcttagacaccttttaggctactacatagatctcatttgttccataatggcttttgcaagttaatgtacttcttaaagtttccttattcataccatcattaccttattaccttagtacataaaagtgtaacgtaagcatttgaacagtcttgtggtctttcagtacctggcctctgtgacctatgggtttgcagccaaggagagttctttgttccataaggctaattattttgttagaaaataactcattaagtgggaaataattttagtgtgctgcttcattctttatatatcagtggttacactacagatgatatgtatttgaaacaaatggcacaaagaaaaattccaaacagaattgcttttcctctgggacggccttcttgcaaaaatttgtgaagctcttttttgcacagctgtcaggcattcccaaatggcttttcacaataaaattctacctatctctttcactgatcactaaatgagacatatgcggttgttatagcgagcaaaatggtgaggcttgagcttcttgtaaaggtatatttgtgtccatggaggcctgctagtattttatgtatatgcatcctaagttggttaccaaatgtactcatatatgcaacttgttttgcaacaggaaatgagcaggctgtgacagggaaattaaatttctgctaacttaaattcaacataaaatattcggaatacacattacgtatgtacttgtcattattatatgaagagcttttttaagtttaatataaggggatgaacctttatttttttcaatgcaattattttatattttgttactgatttcaagtctgctaagtgttaaaatggaaaattttcatcatttcttctgttttaagtcactgataatgtgacctggtttaatatactaaaagtatcatcatgttgtttaatgttttctaagttctctgctcatgtttattcttttacaaaatttggcatagtctcttaatatttaaactagatgaccatgaatagttttgccttctcagttattttacatgttagagtaataaaatcattctatcaccagaaattattctttattgaattcaacagacagggttattaggggatagcaaaaaagcaaaaatacagtctgcacctttaaggcccttactgattcctgagagatatgagagtacacaactggttggatgatatcagtcagaatgtgagtcctgtgtgaggctgaaaggtctggggaagcacagaagaggaagggagccctgtgggaggagggcgggctgccactggcctaagcctgaaaagacaggccggggttagggacaggcagaggcaaggaggaggaggcaccaacgctcagtactcctcttgttttgctgtaatgtagaatatgtgaaggaaagaagtgaagtaaacagtttgtggccagagagcagtagctctctgaatgataaggagtttaacttgaaagggctggggagcctgtgaagctttttaaaggggagaacataaatatgaatttggtgttagcagtaaaatgaccacggactatttcaagcatttttagtctaaatttgtcattcagcacaagagcatgaggccgtcctattcagaagtatgtacagtttgtttctcattaggaattccaggttgataaaccactcacatgttttcatctggtccccacgttattaacaaaagagtgactagggcagcaagtacaatttgtacctagaacagaatttctgtctgtgagaaattaattggcctgcctagagatcaacctcatttaagttcctggcctcattagctctgtagtcaaccaacagagctagaatctaaatggaaattgccatctgtccagataaagattaaagaggtaaaaagaacatacacattttccagcatagaataattgttggctccattacatagtttcttttcagaaaaatcatttgaaatttaattccttttacctgtaggagatcttaagtctaagactatagcctggaaaataacttataggtgtgtaagtttgtaagataaaaatgaaaatgttgttgacattttgatctaatagatccatagatcttgtttacatcatgatcattactggtcaatgaaattattagttttcaatcacttttattaaatataaaacttagctaatctaaaaattttctctattttttatattcaaacattaattatttactgtcaagtattaagtttaggtacttcggctcatttaatccttttaacagctttgcaagatatgtgttgttagctctctcttcacagacgaggtatcacattgcatctcatctggcaggagcagagctgggtttttaagcttgtgcttcaaagcctagctcttaacccgtcccccatatgctaagcatacatgcacgatactgaatgcaccaagtagcttagagttaaatggagtctatattaaatttaactattctagtttttatcactaatcaaaatgaaacagccttttaaataatcctattagctatgatagtgttttatacattttaagaccatgtcagactagttataacagaatgagctgaatattgcttctttagtactaggagtactagctcccaagctgaatctcctagtcagtttttcatttaataaaacaaaaaacaatgtaggctgggtggggtggctcacacctgtaattccagcactttgggaggccaacgcaggaagatcgctcaagcccaggagttcaagaccagccaggtcatagtgaggtctcgtctctacaaaaaaatatatatataaatggcagtacatcattttgcctgattcccccatataaactccttatgtaccatttatgacattctttaaaatcttaaatacagttattggctaaaatttagattttacaaattgtttcatttaagcgttccataatcacatatagtagctgtttgatgtggtccctgaagctagattcaaaagcaccatgaactacattattattagccttttccagatttaccgtgatatattaatatgataaaagtcagtacctaaaatgtctgaagaaaactgctaaactgcttgtcatcaaattttcacttttgaataaaatgttattcccccccgaccaaattcatgtttttaagccttacaccctagcagagaggagagggagtttttataagcacaaatatttaatagagttaaaatttaggatattagaaagtgtcaaaaaaaaaaaaggaataagacctactattttatagcacagtagggtaactattgccaataataacttaattgtatattttaaaataacttaaagaatgtaattggattgtttctaactcaaaggataaatgcttgagaggaggataaaaagagaaaatgtcaacacttctggattatctaatagctgtttggatcaaacaaagattaattaaaaataaaatcttcattaataaaaattcatactttattaatttttttttacttaatattattttcagttccaaggtctcattcaggagaccacattaaatttagtcatcttgtcttcttaggctcctcctggctctgacagtttctcaaacattttttgtttttgatgaccatgacaattttttgagacatggtgatcagatattttgtagactgtccctcagttgcaaattgagtactttgtaatattttggataacagtcctttatcatgtatgttctgcaatgattttctcccagtttcttttcttttaaaaaatttttaagtatttacgtatattttttgcttttattattatttttaattgacacataattgtgtatatttatagggcacagtgtgatttttgatacatgtacacagtgtgtaataaatcaaggtagtcagcatatccatctcctcaaacatcatttttttgttttgggaacattcaaaatccactcttttgctatttgaacatgtacagtaaattgttatactctccctacagtgctatagaatactagaacttattcttcctatctagctgtaattttgtatctgttaaccaacctttggctactgcccacctccccagcagcctctagtaaacactgttctaccctctacttccctgggatcaacgtttttagcttccacatgtgggtgaaaacatacagtatttatctttctgtgcctggcttatttcacttaacataatgtcctcgaggcttatccatgttgctgcgaatgatagtacttaaatcttttttacagctgaatagtattccatcgtttatatataacacattttctttatccattcatctattgatggatgcttaggttgaattcatatctcggctattgtgtatagagctgcaatgaacatgggagtgcagataatgcttcagcatactgatttcctttcccttggctgtattcccgatagtagtgggactgctggtcatatggtagttctacttttgaatttttaaggaacttccatactgttttccatagtggttatactaatttaaattcccgacaacagcgtatgagaactcgtttctccgcgttcttgacagaatttgttatttttggtcttttcgctaatagctattctttttttttttttagttttagggggtaagggggtacatgtgcttgtttgttgtgtggctgtattgcatattggaggagattgggcttgtagtgtacccaatacccaaacagtgaacgttgtacccagtaggtagtttttcaatctttgtcccttcccacgcttcccccctttttggagtccctagtgcctgttatttccatgtggcaatagctattctaacgagggtgagatgatatctcattgtggtttcgatttgtatttcctttataattagtgatgttgaacatttttccatatacctgttggccattcatgtaccttcttttgagagatgtctattcagttcatttgcccatttttaataggttttttttaatttttattttttgctgttgcattgtttgggttccttgtgtaagaatttcttgggaattttaattatagggccattatgaaaaatagtatggaggttcctctgaaacaaaacaaaacgaaaatagaacaccatatggccagcagtcccagtactagggatatattcaaaggaaaggatattaatcccttgtgggatgagtagtttgtaggtattttctcccattttgctggttgtcttttcagtcttgatgtttttttttctccaggcagaagctttttagtttgatacagtctagtttgtctatttttgcttttgtcgcttgtgtcttgaggtcttctccataaaatctttgtccaaaccaatgttctgaaatgtttcccatatgttttcttctagtagtttcatggtttcagctcttacatttaagtctttagtccattatgagttgatttttgtatagggtgaacgttaggggtctagtttcattcttctgcatatggatattcgcttatcccagcatcgtttattgatgagaccatgtatttcccaatgaatgttctcggtgcctttgtcaaaaactggttggctataaatatgtggatttatttgtgggttttctgggttctctgttctgttccagcatgtctgtttttatgctagcatcatgctgttttggttactatagctttttgtagtatattttgaagtcagacaatctgatgattccagctttgttattttaactcaggattgctctggctattcagggtcttgtgtgattccatatgagttttagaattttttttttctatttctgtgaggaatgtcattggtgttttgatagggattgcatttaatctgtagatcacttttggcagcatgatcattttcacaatattcttctaatgcatgaacatggggatgtcttttcatttttgtgtcttcttcaacttctttcattagtgttttatactttgtcttgtagagatctttcatccccttgatctgaaactcctaggctcaagcaatcctcctgcctcagcctcccgaagtgctgagattacaggtgtgagccaccacacctggctctttccttcccttggttaaatttattcttaagtattgtaatattttgtaactattgtaaatgggactgctttcttgatttcttcccccctgcaatttcattgttgttgtatagaaatgctactgatttttgtgtattgattttgtatcctgcaactttactgaatttatttatcaagttctgaaagtttttttggtggcgcttttagagttttctatacataagatcatgtcatctgcaaacagaggcattttgacttcctcctttcctatttggatgtctttatttctttcttgtgcctaattgctctctctaggacttcaaaaaacggcaaaaatttgcattacaataaacctataattgtaagttgaaatttgaggagtttgcctcaaacctaaatgctatgaaagctagtttagaaagtcatgtaaaaagctagtacgtaaatgaaggaattatattgtagccgtttaagtgaacccaagactggaaggctgcacagccaacttgttcttcactgctcccttccccactggatcgctgttacttcctgacttgggagtcatttctggctgagctttccctcatctgtgttagatgccactcctttgagttccttcggcacctcatgccttactctgtcatgctctgttgccattgaaatatacctcccctctcctgtaagctccttgagctccaggactgtctttttcatctttgtatcacagtgactggcacagtgactggcatatgtcagtgaataatagataactagttatgaggctctgagttctcaaatctttgacctcgaaagcttttctttcgtataagaaaacaactaatccttgcccctacaatctcagtttacttagcaccctgtcaattggaaattagtgtaatgtgagagggattcagtttggattcctgactgcccttcactggccgtgtggcccttcactagcttgcctgggcaaggcactgtatttgtttttctaggctttagtcttgaatcttctcagtgaaaggtttgagtgggtgatcttcatgttccaatacagctgcaaggctctgtggcctagcagcagagtggagtagtgaaagactagtcacctgacaggcagagcaaagtctgttcctcacccaaccactgagtagcctggtaactcatgcttaccaagtatttgtgcatatctactgtgccttgaagatttgtgtatgtgatgtgccagaggcaaaacaaatgctaacgtaatttagaaacacagatattaagttagttaagtataggtgtaattaggttaaggtaggtataatttgtgttaattatattttaccatattcttatgtgaaaattggttattcacatgtggtatatgggatcattaggatatagcattacgttaatcaagataatgtttctccatttctttgtcttcctggttaataagtgtttaggaaagttatttcttgaaaatgcttgaaatgtagtcaaaaaagtaatttgaattatggtttaatgttggccagtatattttattttgcttcaagaaagtttaataaaaaacattaaaaatgcaaaacaatctcaacaatgtgaacttttacctttttgatactttttgtattcatcatgattgaggattctgacttttgaggtctgtttatttttatatantttcagctcatttagaggcgagttttgaggaggtagagaacaacctgctgcatctggaagacttatgtgggcagtgtgaattagaaagatgcaaacatatgcagtcccagcaactggagaattacaagaaaaataagaggtgagtttgaaaagtttgccacagtattcattccagtctcgaagttttccatattactttacatgctactctttagaagtcccggctgataaaagacaaaggtttcaacataaaactgataaataagctttccaaaactttttttaaaaaccactgtctgttgccatcttttggagatgagttataaaaaactcaggagaaggtaaaacatgaatcccaaatataaagatgaaggagtggagcacagggcaaagttttccagcaaaataggagccctgagctagttttctccaagaggcaaatgactgggttgctcttttcttttcctgctcttctcctccattactagagcagaaggaaaggagcatgagctcaggctgtggaaaggggctggagggcttcaaatctcagctcggtcacacactacctttgagaccttaggcaaattattttatctctcttggcctcaatgtcactgatttatgatgggataatgatgtacccctatcatagagttgttataaggattaaatgaattaattgttacctaattcagttagtgctttgtaaatattagttataataatggctgttatcactaggccaacctgaactggagatggaaaaggagtctaagggtaacagcctgctagactagctctggcatcccaagtcctgcagtggccatctcagagaaggaaggtacagggttggtatttctgaagtccgtggggagtcagtctcagaggacatgagacagactgtcatctgtgctgggcgcctctggaactgaagctggaggcgggctttgctagttgggaggaagcggaagtcatgggattgggtctggctgtggcccaagagcagatttggtggagagaaagatggataggttgggcagagtacactcttggtgttaggagtgttgatgagtggagctgttctggatctaggatgtgacaataacaggagtgggttgctatcatggacaggaggagctggtcactaatataccaccacccccctacccccaatgaagctaatacataggtgaggtggattattgtattgatgttaaaatcttctagaatgaggccaagggatgaggcagaaatgaatagaaatgagtattttagaacacaagttctcaatcagggtcatgtgtccttagagatgggcactaaatgttaatgagccataagagtcacctggggagagtatttaaaatggggattcctgggcttcatccttggggagtccattctaaagttaattccagtggagaaagttgaaatgactccttattccacaagcctctagaatggtttaaatttagaatggtttgaaacaggcattctaggtaattctgatatgggtggcctgtggaccatagtttgagagactgccaggcagggatgggagattgggttgtgtgcaggctgtaaatggaagagcttcagaagagctccagggaggccatggatcaaattgttcacaaaaggttgtatgtgtgcgaattttccagaggtgctttctgtacatttcatttgtcccacaaagattgtaggagggcatttggcagcattaagaatggagtccttggccaggtgcagtggctcacgcctgtaatcctagcattttgggaggccaaggcgggcagatcatgtggtcaggagatcgatactgtgctggctaacacggtgaaaccctgtctctactaaaaatacaaaaaattagccgggtgtggtggcgggcgcctgtagtcccagctactcgggaggctgaggcaggagaatggcatgaacccgggaggcgcagcttgcagtgagccgagatcgcgccactgcactccatcctgggcaacagagcaagactccgtctcaaaaaaaaaaaaaaaaaaaaaaaaaaatggggtccgtgtcaaaaaaggggcatttttttttttttttttttttttttttttgagatggagtttcactgttgttgctcaggctggagtgcaatggcatgatctcggctcactgcaacctccgcctcctgggttaaagcgtttcttctgtctcccgagtagctgggattacaggctcacaccaccacgcccagcaaattttttttatttttagtagagatggagtttcaccgtgttggccaggctggtctcaaacccctgacctctgatgatccactcgcctcagcctcccaaagtgctgggattacaggcgtgagccatcacgcctggcctagagaagggacttttgaatgagtgggtgagccttgtgacccagggcatttccagactgatatgtgggtgtgggaaaagaggaacttcccttaagaggaagatagcagaggtagaaatggtcaggctagtcttcattgttaaatgaaaagttagagagacattctgttgtgaagaagttaggcatggaaatatgtttataatgcaacaagagtttcaaggaacatggtaagaaggcctagaattttgagaggaaatttttgcaggaggttggacagcttgggtacaggtcatgtgaccctagaaggtggttttctcgtgtgtgaaatggggataataatagtacagtacattatagggttttagggaatcagtaaagtgcttggaatagtgcttggcaccagctaagtgctctgtcagtggctgccagctctgactaactcgtattattacttgtgcagctataaagaaatgggtattctatatttttaaatagcccattgctttttagctacataatacaaaaagtatatgaatattgtgatttttctatcaagatatgttgaaatgtgattgttggaaacatatgatagcaatacctcaaagatattgtggattctgttccagtccactgcattctgcagtaaagctagttacatgattttttttttgctttcctagtgcatataaaaattatgtttatacagtatgtagtctattaaatgtgcactagcattatgtcttaaagcacaatgtacataccttaattaaaaatactttattgctgatgatcatcagccttcagtgagttgtaatctttttgatggtggagagtcttgcctctatggtaatggctgctgacttatcaggtggtggttgctgaaggttaagatggctgtggcattatcttaattaaaataagataacaatgaagtttgctacatcgattgactctttcttcctggaaagatttctctgcagcatgcgttgctgtttgacagcatttcacccatagtagaattacttaaaaaattggaatcaatcctctcaaacattgctgctgctttatcaactcagtgtacataacattctatgtcctttcttgtcatttcaaaaatgttcacagcatcttcaccagaagtaggtttcttctcaagaaaccacttcctttgctcatccataggaagtaactcctcatctgtttaagttggatcacgagattgcagtaattcaatcgtatcttcaggcttcacttctaattctagttctcttgctatttctaccacatctgtagctatttccttcacagaaatcttgaacctgtcagagtcatccatgagggttggaatccacttcttcaaaattcttgctaatgtttgatattttgacctcctcacattaattatgaacattcttaatggcatctggaatagttaaccctttccagaggttttcagttgacctagatccgttgaaggaatcattatctatggcagctatagccttacaaattgtatttcttaaataataagacttgaaagttgaaatgactccttattccataggctgcagaatcagtgttgcgttcacaacaatgaaacaacgttgttctccttgttcatctccatgagagctcttgggtgaccaggtgcattgtcaaggagcaatattatttggaaaggaatttgttttttttttctgagcagtaggtctgaacagtaggcttaaagtattcagtaaactatgccacaaacagatatgctttcacccaggctttgttgttacatttatacagcacaggcagagtaaatttagcataattctatggattttcaggatgcctccaaagattttcagagtagtaaatgaggcattggcttcagcttaaaagtcaccagttgtattagtccctaacaagagaatcagactgtcctttgaaggtttgaagccaggcatggacttcctctctctagctatgaaagtcctaggtgtcatcttcttccaataaaagtctattttgtctgttgacaatctgctgtttagcatagccaccttcatcagttatcgtagctagatcttctggataagctgctgcagcttttacatcagcacttgctgcttcaccttgcactttgctgttatggagatgactccttactttaaattccatgaaccaacctctgctagcatcaaacttttccagctttctcacctgttttagctttcatagaactgaagagagttggaaccttgctctggattaggttttaacttaaggaagggaatgttgtggctggtttaatcttctgtccagaccactcagactttctccatataagcaatacggtgggtttgttttcttatcgttcatgtgttcattggagtagcatttttaatttcctttcagagctttccttggcattcacaacctacctaaccattttgtgcaaaaggcctagcttttggcctgtcttggctttcgacatgccttcctcactaagcttgattatttctagcttttgatttcaagtgagagatataagactctttctttcacttgaataattagaggccattgtagggttattattaataattggcctgatttcaatattattgggtctcaggaaatagaggggtccaaggagaggaagagaaattggagaatggctggtcagtggagcagtcagaacacatacaacatttatggggcttgtggcaccccaaaacaatgacaacaatatgtgctggtgtgtaccacagaattctagaagggctcaggaattgaaggcaccaggatcttgaaagataaggtgtgttgaaagcacgtatgtgaagtaagatcccttgatcctccgcttagccaggtgatcaccctatccctagctcatcaggcaatgtggaatttcacctgaggggctccagacttgactctaacacacttgaggacaggtagacatacaaatgtattgaaaacagaggaactaagtgaaagcctacgtagtaaacaataagactgtttaggcccttttccccagtaggtcccagaactccggcagccaaactcacatcccctgtgcggaagaatggagcattcatctgcaaaactgcacttgaccagcccacaagaaaaggcctgcagatatggatatttaggttgtatgtatgtggtgaaacagctaggtctgctcttaccaccctctgatgctgagcccacactctgcataacttcgagtcaacttttgttgcctcactcaaatacaaatagacagctgaggaatcatattcaattaagaaagcttccaaaatgaaaacaactgaaatacgtagactataagctagtaaacaatattgtttaaaacctgcagaagaacgagagactgaggagcagaagaaaacttaaaaacgaggctgggcgtggtggctcacgcctgtactcccagcactttgggaggccaaggtgggtggaacacgaggtcaggagatagagaccagcctggctaacatggtgaaaacctgtctctactaaaaatacaaaaaaatagctgggcatggcagggtgcacctgtaatcccagctactcaggaggctgaggtgggagaattacttgaacccgggaggcggaggttgcagtgagccgagattgcaccactgcactccagcctgggagacagagcaagactgtctcaggaaaaaaaaaaaagaaaaattgtaattagtagcttcagatatatgggaacatcttgtaagagcccattttgtatttatgagacaagaaaagatgctgtagaaaaggaacaagagagagcttttagaagcacatgcaccctataacttaaaagtattaaaaaaaaaaaaagaaggtagcaaaagtagaaaatttcacctgaagcataagataatgttaaacctctaagagaacaaaaagtctgaggaaaaactaagaatgttaagataattcataagtcccatgtttgagtactaggagtttcagaaataaaggagtgagaaggaggagagacaaatttattgaggaaataacataaggaagttgtccagaattgaaggatatgaatgtttgagtttaaaagagcccatgaagtgcccgacaaaatgagtggagaaagatctgttgtcaaatacatatttttgtaaatttcactacactaggaataaagatcataaaagccttcaaaaaaggcttttatattaaggatcaggaatcaaaaggaacatcaacttttcagcaacaatgccgaaagtagaaaatggttactaagaatatttactgggcaaaattttcatcaagcatgaggaaataaagtcatttccaggcagccaagggctccagtgtggtggatgtggacactttgtcaggaagctcctggaggatgtgctccacacacaagggagtaacccaggaggaggaagagcctgcacagagcagagatgagtcactccaggaggattcattctgttcagaagagacaccaagggaatttctagggaggtggtgagaagcttcagcaatcctagagagcaattcatattgggacaggaaggccttctggagaattctaagtagtgtttccaagggggaaaaaatgaagctaatgcattgtcttatcggcgtggcaatattgagaggagctttatgactcctttatttatttatttatttatttataacttgaattattaaactctggtggagggtttaatgaggaattagagataaatgtgtgtgtttttttttaaaccaagcaaacaacaacaaggtagatattaacactgaggggaaacagtttttaaaaaagagaaataatatgctacatggctcagtcacaaacagtatttatgtgatattggaataattaaaagcagaattgtgataaaacttgctggggagatgggggagaaaaagcatatttgtgttgaggggaattagaggtgtaaaatagctaatcctcatcttctccagcaggaaatcaagaagtaatatttaaaattgaaaaaagaataaatattaatatttgcatattatttagaaataacagaggtaaatgccaggaaaaataactgaaagaattgaacatggctgcttgtgaaaaacagggcagaaaggtggagagagctggggcagggactacttgtcttcactataaatacatctcctgggtgctctttgacttcaggaatgggtatgtactatcaacatgcaaaaattgaattaaacattttttaattaattccatataacattccctgaattcttctgcatggaatactagactgaaaaggttgccattgataaaacagtatgtgatcagataagctccagaaacactttgcatttgcccacggagctttgcagtgtgcatcagcgtgctaaaggttctgagaattcctgtggtaaagaaatgttttgctgggcacggtggctcacacctataatcccaggactttgggaggctgaggcgggcagatcatgtgaggtcaggagtttgagaccagcctggccaacatggtgaaaccccatctctactaaaaatataaaaattagctgggcatggtgttgcatgcctataatcccagctacttgggaggctgaggcaggagaatcccttgaactccggaggtggaggttgcagtgagccaagatcgtgccactgcactccagtctgggcaacagagtgagactctgtctcaaaaaaacaaagaaatattttggccgggcacagtggctcatgcctgtaatcccagccgaaagcggcagatcacttgaagtcaggagttcgagaccagccgggccaacatggtgaaaccctgtctccactaaaaatacaaaaattagctggatgtggtagtgggtgcctgtaatcccagacactcaagaggctaaggcaggagaattgcttgaacccaggaccgggaggttgcagtgagctgagctcacaccactgcactccagcctgggttacagagtgagactctgtctcaaaaaaaaaaaaaaaaaatttttttttgactcagcatttcacaacttacttgctcacagaatcaatttgcatgtaacacatattaacattctgtgacttagtattctacataacaccatttgagaaattttcaaatactgccagtgaaaaacttttaattttctggttcataagagatgagtcgcttaaaaataaaccttcttcctttttaacaagatgctatgcaaactacactaatgacttttcttactctgaagaaaacgataatatgtgatagaaaaagttggatatgtgatatgcttatgtgcatgcatttttttaacaatgtttgcacaccctgtagctttcccaaaaatccgggccagaacactggatgaaggtggggagagtgggagaatgaaagataatttttcacactcctccagtgctaataggctctgcaataggctcctatggcttttctcattcagctcccaccagagcctgtagtgtgggcagggcagcaatttttggagttgagaaggagattgagttgcattaagtcatcagactatttaggggccagcatcagaaccagagtcttcagtccaaggctcccaccacaccaccacaccaacccaaatgtgtcttcttttttgatgttaagttggaacaaactgattgagtcccagatgtttataccagtgcatctgtagtttcaaatggatatatgatattttgtcattcatttgacggacgttcccagcagagagaatacattcctgcccctacaaaaacaggactgtgacccattataaaataaataaacacaaaataaaataaacgtgacagtggcttcctagtcaggggattctcccagtgggtagggaaatatacagcctagggatggttctgatagctcttacctacccttgagaaacatttgaatagacggtttaatccacttcatttgtgcagtaaagtaggacatctctctttagctagttatctgagaaaagtgccatctaagacacttgtgtggttgtacggggaaaatacccataaattgcttttctaaatatttttctgcatgtaaaatgatattactgttaccagtgcctttgtagactggaacggacattgccttgataaacaacaaaacattgtgtagtggctagaatatggctataggcaaagacaggtactcaaaccagtagctaagttgtcagatagttcagaagatgagtgctacagccatacgagtctaattcatggacccctggcagaagcttttgtaaccaataggaaatacatttttcgtaaagaaagaagagctaatatttagtataggagccaaaataaagaacttaaaaccatttacatggatttttctagctagcaattagaaaagtgggcttgagatttgagggtcagcttatattcttaggggtgtggaggaagacagatgataaatttataaagaaaaaaagaataatttcagacaataatataaacctcaaaggaaataaaatggagtaatggtatagtggtaaggcaggggaggactgcttcagctagggtgagcaggacaggctcttctgagaagatatgtgagaagaggtttgagtaagatggcagtcatatgaggatctaggactgtatagctccaaacagaaggaacagtgggaacaaagaccccgagtcatgaacagtaggtacgtttagagatagagctaaatggaagtatagaatctcaaccttctagatttttaatctttccagtgccaccataatccttagagtgcttattgaagttctctcacaataattagttatacttgaaatcatccataagtgtgtaatttgattaaaatatttcttatttccaagtttctagatcccttatgcatctccttcagtacttatgctttccccttcagtacacagcataccatcagaatttctccaaaaatagtaacatcttgaagaacagtgattttagcaattcttgttaattataagtgactcataattttaacatagtcttctgttggactcgaaacctgcttaggggcatactgactccagaaacatttttcactgatttatccagactttgaaatttgcttgtctcctggaacccacctcctagaagtggtggtcgctgctgcctctgatgagatttagtgcttatgcatattttaagggtcctgattctttttgctttatgtttatatatctactatagttaatgccaagggactctgcccttctttttgtttgtgtttttttgttttgttttttggtaacatttggactatggactatatttagaaaatctttagaacaaagtataacagatatatttaagagattatggcgtatctgtagtggcgtttgaccagtgtatgttctagagactaacttgccaaattcctgagcttcaagaaatgagtgttcaagctcacctgccaagagactggcaagctggggagaaggggaggtgtggcaggagtgtggccctcaggcctggctttgcggagctgagaatgggagagaagaaaccaacagcattctccagggtaaagatccaaaaacgatctcttttggttcttctggaaccaaaagagaagatcgagagcaccttctctgaaggagccaagcagcagggcagtaactagcttctgcagttctgcagcagaagtctgtttggatgctgaatgaaaaggggagcaggagaacttttccgcaggcaatgactttacaaaaagggagcagacttctgcatccaccaggatggagtaacagggaccagatttattctctcccccgaaacaatgaaaaaccaggtgaaataaatgagagaatgtttttaagacactggattttggacaaagaagagatgtgatggtacccgatagataggaaacaagtgaggtgagccctgtgattgcctctgcatcctgcctagagagagtttccagggtgcactgcagggaagtggacccaggcagagcctggcagactcagagttgaagagctaaatctggggagatcaaggcagctggagtttacaggacatagtcccagagaggagagagtttctgagagggtctccatgaatattcacctgataatacaggtgaggaaactatccaaggcaggagggaaaaaaatatccaagagggtgagctaacagtgcctggcactcacacagagcctcttcccaatagtcggactgggaaaactcataattactgaggtattgggaagtggactcggtgaattcttgcctcagtaggatgtgtaattggcttttgtctgaatactgctgaagacgtgcttagcaaatcataaagcaagcatcagaagaatcaagctgtttccaagtaaattaactgtataacaaacaaagctcaagagtatttataggaatataaaaatacctagcaccaaacaagataaatcacaatgtctggtatctaatcaaagattactaggaaaacatatggaggaagatagtcaatcaaagccattaaaaactgacacagatattagaattagaagacaaggacagtaaaaattgttattgtaactgtattctgttcaaaaagtgaagtagagacatggaaaatataaaaaaggctgaaacttgtatctcttttctccattttctccttttactcccccctctccctattagatgctagattttagatggttcccaggtggttaattgaaagtaaattgacatttttattttattgtatttattataatgtaatcacatttactaggccaatgacctcttgaaaacagactgagagctatgaatttgttggcttcataaatgtgtaatcacaccttacattttcttttaaaattaaacctaagcttatgagttggcaaggaattgaacttaacaaaatttttgctctaaagtgtctgttagagaataaatcttggcagtttcagactttatgtgtagtcacgagaacagatgtagctagaatatttaacagtttattagatccttgggttgacagtaaatagagtttaggactgatatttaagttcataaagctttattttgaacaatgagtatctgtttgccatttttaaataataaatgtctctctaactggtttacaaaattcttttcgttatctctttcctccagttatgcaaatgacacgctggggttcaagctttttgtttttaagaggcatgaaaacctaaagtgtatctttgaggtggagaggagcagagactaaagatatagcaatctcgagaaaagttttttgaaattaagcaaagcaaaattattattatcctgggttgaaaagtaggtaatccttttttccaaagttagattgattatagtttgtacattataatttagagtctgtaataactttcagtgttttagaattcatttattacatttggaataatattttatgttttttatgacccatagttgtgttggagtttatgttccatcagttactgtgtttttcaaagatactttcaaaagtataaaatttatcagttattttagtcttcagttgaatgtagctaaaaccatgatattaccctatgcttttctcacttttctggttttcttgacggatatgagagctgggacaggcagaggcacacctggcagcctgccatacctgctctgacatcggtggtaagcaagaaccatggtgaagtcagcaacaagaaaacagtgctcctcctctctgctgcagcccttctctaccctctctgggcagtgctctagcatggctgtgttggccccgttttttctatggctaagaagcaggtctctttttcttgcctgccttttactattactagtctttcattctggctcagaaaaaaaaatggcactataattgtttcaaaggaattgaaacaattgctactggagatagttttttgttttgttttgttttgttttcagacagggttttggtatattgctcaagaggtcctcctgcctcagcctcccaagtagctgggattacaggtttgaattattgtgcccggctaatgctactggagaggtttgatactggatttcaaagagggacattttcccccaaagatagcaacattttccttcctctctggaagtttcatgttatgttctgtttaggaccctttttttttttttctttttctttttttattttgagatggaattttgctcttgttgtccaggctggagtgcaatggcgtgatctcagctcaccacaacctctgcctccaggtccaagtgattctcctgcctcagcctcctgagaagctggaattacaggcatgcgccaccacacctggctaatttttttttttttttagtagagacggggtttctccatcttggtcaggctggtcttgaacccccgacctcaggtgatccatctgcctcggcctaggaccaattcttattataactgatatcagagaagtgcattattgtcatataaaataacacgttacttttgaggcagagaaaatagaagttacagttcttaaggattaattcaggtagatttgagaatttattagttgatcccaatatttttgctgtacatgggtttttaaaagctaaaaagtatcctttaaaattcttaacattggactagtttggggaaagttaaaacacgattttacctcataatgaacttttaagaatatttcttaattaaaatgaatgggcaaggtacatggcataccacagttaaaatattgtcgaaaaagaaagattgcatcaacattgtataatatgaaaacattgttagagaacaaatccatgattcatttgaagtgtttaacctatgtttttcttagctttttaagtaactaaggtccttgacaaatcaatctttatttacctgacttgatactgtcctctcttgacttcaacaccagtatcccagatgttcttctctgcctcaggttcattttagttttctttgtaaatgttttaatgctggtgttcacttgtgctctggtcttggttgttgcctcctctcattctgcagaccctccttgggcatgctcttctacatccttggctcatctgccagccataaggtgatcattatcaaaccactgtattcagtgcaggtctctcttcttacctgcagaaccagttgccacctacacagctattcctggacttctcaacagcaccatgcccaaaattgtcttccacagcaaaacctgacctttttctgttctaataagataccatcactacagatttatccaggccacaaatatgggagtcttcataatctcctccttcctctcctaccacctgctcagttctcagtccagcccaatatttcctgactctgtccttgcctttctgtcttcactgatcctttccggagttctagcccacgtctttgtagcctgagttacactaatagcctcttaattagtcttnctgtctgtagtcttgtgtcccttcatttatattactgttagagtgctcattttttcccaaatgtagatattaagatttctgatcgtcaagataaaaaaaattaaatgatgatggtgactatagcagtagcctttattgaacacttaatatgtaccagacactgcttaaaaactccaaattaactcatggaagtctcacaatgaccatttgagtaggtgtactctcttctctaccaataagaaaagagagactaggggagataaaacaacttgtcaggagttggaagtagcggtgctgggccagaaccaatgttttcctgacttcaaagtctcctcatatctttgatagtaaactgcctccacacaaagccatctgtactctgtgcttgggtgccatggagtatggaaaggaccttgcttctctgcgtgtatggactgctgtgggtgactcaatgtaaggatggattgagattttagggcctggtgccgcttgatcaggaatatatttgtatgtgggatgcatgagtttaaaaaaaaaaaatccaccttctaccctatcagctataaatggcaacaagcctgtaaggatatacagtttcaagtggtggggcatgactgcagacagctaataaatgacaaaccattgatttggtgataattaatggtaggatggctctttaaggaattggctagccactaagaattttgaataaaaaaatcagtaacacaaaggtgatataaattttttaaatttgtaataaaaatttaaatttaaatttgtaataaagatttttagccaattagttgctgtggactagtcattaaacactagtacaccagtgaaaataaaagtgttttttgcaggcttatttttgaaaaccacgacatgtcttcagggctatgttggggattttacntcatgcatacatcaacgatcctggctttcaacgttagtttttattagtttcctaaaaataatgtactttccccaagctaggtagacccagatgttgcctggatgttttggggtggctctgagtttcacatatctgactctggaattctgtagatttagtgatctacttaagtaactttctgttagggctaaacttgacccttgaactgtattctggatgctgaagatgatacacatgcagagtcagctgtgggttttattcccagttctgtcacttactatctgtgtggccttccatcctcaagccccattttcctcatgtattaagtgagggtgatgatacctacagttaggtaattacaagttataggagacagtatgtgtaaagtgccttgcatattgtggagtatacagtaggaactcaataaatatcccttacccctgtctcatctttccttatcctacttgcttcaacctctctttatccaggcatggcttctaaatcaaatagattttcatgtaaaataggtttagggaaatgattcttgcaaggtgggatggaatgtaatccatgtataacttagtgctgccaacctgcgtagaccttcattatcttttttggaatccatttttcttaaattccaggctttgttaccatatccttcagatccttttcaactttaaattccaagattttggaatcttatcatcttgttactttcttggctgtatttgcccaaaatagatatatacaatttatattaatagcataataaataaggatataatgccatttttacagtgaactggctgctttttaagaggttttattttaaagataatgttgagaatgtcttgctggttttgtataagaataaatgacaacagagacttttaaggtatagagagtcctgagaaaattcatctcaagctggaaggaggtccctcccaccacccacccccaatccccctcaaccccaccaagcctgtagggtggcaccacaggactgtggactgccggaaaacaacagacctctgacttgttggtgatgaatggtagatgcttctttcttgagagtgggcctgtgagatctttcccaggaacaagtagtcacagtaataggttctgtccatcagccataacaaagggacactgttcaggaatgttctataaaagagtattgctgatcatgcttaaaaaaaatttcccctaaacatttctacacatgaagaaaaatgttagggtgcaatttgcagttggtgttttgaatgtggtattttgtgttagccttttatcatggatttgtcctagggaggcagtttaggatttagagagagtttgctttatctgtgtttatggaggcatttatccagtagcttctgtctattaagttttcatcttcagtctgagctagttgatttctactcatatatatagatttaatatacttcttgtaacattccataggcttattaatgtgattctttctttcatttttattctttataactcaatccctggagagaaaatgattaaataatagcagtttcaccctttggaatattattagcttttgatcctgctgttattttttgaatgttttagttttagggttatgctaaattttgtaaaggcattagctgaattgagtaaattttgaaatatgttaacatttaaaatgagacatttcaattttttgtttgatcttctgaaaatactattaaactatggaaataaactcaatttttagaaaatgcaagcaacaaacaagttgtttcaaatgagataatatttgatcaaactttatcaaaaataaaatctatattttattacagcaatggcctctttgaagaagcagatcttagtcatcctgcagcctcagtacttggtaatcatgatttgctgagtgtctgttgggtccaactctgggcacgcatgtgatgcaggatggaagagatgcagtctctgcacttcaggaactgtagagacgatacctgtatgaacagaaccacattacaaggcagcacatgaaatgtataatattgatagagtttagtgctacagaatttttgataaaggagagatcactgattggatgtcaatgaagtcttcttggaaaagatgaacttgaaggctgttttacactaattattattattagcatttttatgctaataacacagtttgaaggagagtgactggaacttaaaactcctgcttacccatgctttttcatctggttagctgagagtatgtcttaatgcttaagagtaaaatatctgccatgttctcgataaatgttgcccatcatcatcagttatactgtccttgaaaatgcatcagctcagtccttgcttctccaggaggcctttcctaccaaacctaagtgtatgagttgtcctctcttctttattcctagagaatcctcagcatgtcattaccaaagcactataatctatgacattgatttctaattattgctttatttctctgtctctcccactaaagttccttgaggttatggaacatgtctattccaaacctagcattattcctaatgctattcctaacattatcatagtgtctaaggcttagtaaatttttgttgaatgaatgattgaactcaaccaagattatatttagtatacgaaaatggatatttatataaggttgatggcagtgacgatggagagaagtggatcaattcaggctatcttttgagatggaattgacaggatttattgatgaattggatggagaatgagggagatggatgagccaaaacttgaggagccgggtaatgccattaactgagatgacgtcgactggagaagaacaggctgtcttgcaaatgtttgagtagcctactccacttttgcataaagctatcaaatgggcagttgcatatgagtctggagctcaaagaagagatcaagacaggaaatgtaatcaggaagttagtagcatatggatggcatttaaagctagggatgaaattggcttatgagcgaatgtaagctgaggagagaagagggcccagaaccaagcctgcagcactccagcatctggtggtctggaagggatggagacaatagcaaaagaaactgaggaggtgggagaacactagagggaactgtttcaagaaaccaccagttgggtcaaatgctgcttaaggattaggatgaaaacagagaagtggtctctggatttggcaacatgatgattgttggtggtgttgattgtgtaatggggggtccagaagccaaattggaatgggttcaagagtgaatgcgaagcgagggagtaggaatctgtaggagttaaatcctcgagtaggctgaaggggatgggaatcctgtctgcagctttcagtcttcctgtttcagcaatttccaaaccgaactcatgcattgccctccaaaatcttttccttcttatgatccagactagaactgccccggttagcatgcttgtctccttcctctccttaccccattgagtcagatgccttgggctgttgagtcttctttatgatacttttcaaattggaatccttcatttcattgtcattaccacttaacattgctcttgccaagtattaattagctcttccccacgtgcccccaacgtgagtttcctgtgtactcactgcttttattctctcccttgccagtatatccatccatcacagctagaacgttcttcctaaaatacagctttgctcatgttattctcctgctaaaaataaaacaaaatattttagcctggcactgagaactctctacctttttatctgaattactttctcttcattcagcctgctgttctgaagtatttgctccaggacaagtacttgctgaagtattgctgttctgaagtctgtttcctaaatataacctgcgtcgtctttggcctctgtgacctcacagtcactgctgcctgtgactgacatgcctttccctgccttctcttacattttctatatttccaaatgctgagtacctctaacagatggtggagtacaccctaacaattgtgaaatttcaaggctttcagtgctgctgctttacctcatcagttccttaaaagttccataatactggttgggcacgatgactcatgcctgtaatcccaggactttgggaggccgaggcaggtggatcaactgaggtcaggagtttgaggccagtctggccaacatggtgaaaccccatctctactaaaaatacaaaaattagccaggcatgtggtggtgggtggctgtaatcccagctactcgggaggctgaggcaggagaattgcttgaacccgggaggcagaggttgcagtgagccaagatcacaccgctgcactccagcctgggtgacagagcaagactctgtctcaaaaaaaaaaaaaaaaaaaaaaaaaaaaaaaagttgcataatactgatttttttctttaaaccaattatttgtaccaccactacttcaagcagtcatctgttttaggaattgggtacaggaatgattttctgaagggaagtttcctggaaatttcgctgacagttgtggagttgtgggtcatgacgctgtgtgacagaggatgcccagaagatgctgggcttgtcctcttcacagcagcagacagacggttgcagggtgagcaggatgagtccacaggaaaaccgccctcctcaattgcacactcactcattaatgtatttaatagtagttgctggattccttgtttttatggttgttagtatttgggggtaggagaataacagtgtctgtgaaatcattattctgagtttcagctttttaaaacaagagagccctttagaaattctgctcacagtcacacattctaaaagaagaaaattagaagctctctaaacattgtaatcatagaaaaaaaaaaagaattactcattagaatattgaactgagtgttctgtcaactttccccacgtcggggaattgctaatgtgaggatgtcactaagaagtagattgaagatatctttttgagattctcttgtgatacatattgccttcctgttgtattctggtttttattatcggggtataaagcaggttttaggcatatttagcttgtacctagctaagcttttaagaatgaagttgattattgactgaagggaaacaattacacaggttttgtttttgtttttttgttttgtttcgttttttttttttttgagacagagtctcgctctgtcacccaggctggagtgcagtggtacgatcttggcttgttgctaactgtgcttcctgggttgaagtgattctcctgcctcagcctccctagtagctgggattgcaggtgcccaccaccacacccggctaatttttttgtatttttagtagagacggggtttcaccatgttggccaggctgatctcgaactcctgacctcaggtgatccacctgcctcagcctcccaaagtgctgggattacaggcatgagccaccacgcccagccacacaggtttttgaaaaaataggattgaaaattcttgcatagtttatgaaccatggtgctggataattattataagtagatattgttaggaaaaaacggagtgggatgaccatctgatttaagaaccttcactttggctgttgcaagaacattatctacttggcctttcagtaggcagcttgccagtctcttctagcagctgttgagtgtagtcagctattttggaacatgaggggtattgtaattaggtgtgtagaaaattgatttaagaattcaaaacatctctagatttttagtaaaacctggactgcaagtacaaaataaatgtctcatattttaactgggataaccagcctttatttcctcaaaattactcattagtactgataatgaggaaaaaaaatacgtaactgcaaaattgtgagggaaagcctcaaaacaacttgctttgctttctttgtcacaaaatgtttattttaatctatgtttccccactgtacacttcccaggaaactttgtgttttggcatccttacttaatattgacaaaataataaaccagaagattcctagaggcttggccctttgtggcatgagctgtgcacctcaatcctttgatatgcactttcccccttttctcttttgctgttgaaagggaaaacaactgcttctattttggataattcttaactaacgatctcaaaaatccagtattgaatatttatccatcaaggaaaaattgtgttaagtgctttttataaactgattcttacatgtatgagatggttcatagctgggattaaaatgctgtctgtgttcttataattgttttattgtttagatgaaattgtttagattattatttggattctggtggaacttttttgagccattaatagaaaatagcagaaataactgaaaatagttggtttaggctcattgtactggtcatttcagtaaagtataactgatatgtgaagatccagaaataccactgtgggcatttaaagtacataagtttttattatgatggaagaacagttttcattggggagatttttaatttgcattgtcttgtcttttttttttttttcctacaggaaggaacttgaaaccttcaaaggtaattttgtgttaattcttcactttaaagtagttgagagttcattggtatcagatgttctctcgacaatgatgaacaaactcattttttaaaatcagtttacataaaacagtaaaacttaatactgttttttgtaggttttgcttaatcacaggtggttttgatattctctttagcacatgtaccaagtgagagttcctgctaatgacctttataagtggtgtgttaggaaggtgcagtgctaactttgaggttgttgagaatcatagtttaagaagattctggtttctcttgtacagtctgggccatgtggaaagggaatggtgacaaagatcaagaggtgcccctgtaattgaccttgcagtcactcgaacctcctgagaggtcttcagtgctgggccctgctctgctgctgtcttgtgactttggatgagtctcttaccttttcaggcacagtttctctctccatctgtaaaattagaggctcagatgaaatatattctgagattccaaaagcacccagcattactttttacttttagggaatgcctgaaggagggacgctagagaataattcttggttatgttgacccttactggtcatggagaaacactagtgaaaaacagaaaaaaacacaaactttccagcagctcaaggttcttccagtttcccatttttcaattaattactcatgagcaattaagtagtagaaatcctattctcgagagattcatttcaataactgagaaaactttttgaattacttattaaatcacttctgattttgttgttttatgcttattatacttcacgtataaaccagcattgtcctttagatttaccgaatggttaaagatttccaagtatatcatttatggttgaattgtttatatgtgtgatctgtttggatttagaaaaaatgacaaattctcaagataaaaggtataaaggcatattcctcctatagctattattgaacagctttgtttggctggatttctgtttgacctactacggctctagtaaatgattaagttcatggccagtttgttgaaggtaatgttaaatgatcatgtgatacaatgtgttgtcatggctgtcattgttcttaattcaatttgtaaaccactacttgtatacattcttttttcaatcagtggtttaaaataagatttgaaatccttataaaatgccttttccttctcattcttttcttttggttgactagtttagtatcttcttatataacagtaagagatgaaaaaaacaatcaagttaatattaaaagacagggcagggacacagattatgtaaaatgtcagttttacttgcatctcagtgctgaggcgtactttttttagtgtgacaatattcagagaaaaagaagagaatagcagtttgcaaaaggttaggtagtgttgtatattacccgatagaataattcaatttaggctgaaatatcttgtttatacacacattcctaattatgtacaattaacagcacatcaaatccacccacagtccaattaaagatctcaaatatgaacaaaccctaaattgaatgttgcattatatctagatttttattatcagtgttcattcaaaattgtttcttcttgagtgttttgctaatatttttaaaacgtggcctgggcatggtagctcacgcctgtaatcccagcactttggaagggcctcctttgggaggccgagggggatcacctgaggtcaggagttcaagaccagcctggccaacatggtgaaaccccatctctactaaaaattcaaaaactagtcaggcgtggtggtacccccagctactcaggaggctaaggcaggagaatcgcttgaacctgggaggtggaggttgcagtgagccaagattatgccactgcactccagcctgtgccacagaatgagactcttgtctcaaaaaaaaaaaaaaaagtaccctataacaagaaaaacagaaatttaatagctcttccaaagtattagtgaagaaaaaaagttgtaaaagtttgttcgaacatattgtggcaatttattattttttgaatattgcctttttccttttcaggttgcaggaaaataaaaggtgttacttcctccaattgctttattcaacttatatttagaagctcttttctaaattgggggaaaactaacttttgagaaccaaaataccaaattagtaaccctcaaagttagtaatgtagattaatatcatccaccatgttctggattctcccttctaatactccattgaggttgatgagttacgttcaccttctggtgcatatggccaatctctacaagattattgaaaccagttgttgttcttattttaatattggcagtaggaaatttttctgtgttccccaaatactgcattcatttaaaatttttagtgacatcactcaaatattagacagcagaaaaagaggataggatcataaaagtccttattttatatttttaatggggaaggaattccattattgtaagcacatgtagagtacataagctttcatagtctttaaagacataagacattgaagacttagctctggaaagcagagccagtggatgaggtaggacaanagtggtcagagaaacaggaagactaaggcaacgtagtgacaaaaaaactacagaggagagtttaaaggaggaaaggtggttatccataatataagtaatgcagagaagttgagctgaatggagagagcctgttggatttgacaatgaacaggtcattggtgacctgaaagagctgtttgtaaaggttgaatccgaattgaaaatcagaagtgtatgaataggccgggcatggtggctcacgcctgtaatcctagcactttggaaggctgaggcaagcggatcacttgaggtcaggcattcgagaacaacctggccagcatggtgaaaccccatctctactaaaaatacaaaaaattagcccagcgtggtggtgggcgcctatagtcccagctacttgggaggctggggcatgagaattgcttgaacctgggaggcagaggctgcagtgagtgagccaagattgtgccactgcactccagccttggcaacagagtaagactctgtctccaaaaaaagaagtgtatgagtagttaggaaataaaggtgacatgaactaactattcaatcatgaatggtagaaaaaaatgaaaatgtaatgagatgggatccgggtcaaagtcaggggaggtatagttgaagatattgaaggagtcattatgataccaaaganaatggaaagaagtggtatccagataggttatccttggagagtatccagggatgtctcttttcctaagaccttagagaaggaaaggatggctgataatatagggaaaagttgacatggaaggattaaataattttttgagaattcacgtaaggaatgataatctgaattttcagggctaggctcagaagcagaaataaaaaagcaaaacaaatatgctttggttaacacagagttggaaatgggaagacatgtaagatgggccagcaggcatggtaaccatggatgctagtgagactatgattgaaatgattggctgtggagttctgactagagagaggggaggcctgaccagaccagcagaataagcaggctgaatggtacaggtgaggtaccccgtaaaggggaagaacacttttagtggttgaggtggatcttgtggtcaaagaagagatttcagtttgaaatcttagaaggggagcaattcccagtgatgatgatggctaaatttgagtaaaaatagaaggcaccaagtcatctgacttggagacttctgaggctgtgaggagtctcacttgtttggatgactcgtggatgtggcttatgcatattactggcttggcagcccttagcatgttacagatagggatgatgatgctaggtggtaaacttcagtagaatttgttggttcacttcaagagttggcttaacgtgtgagacaaaactattcagctgccattgaacaatacttaagtgactcaggttggatgatgttactgtcctctgtcctcagggagctaaaggactgtggcaaagcttatagattagaaaggcaaatatataatttgaatataatatagaaataatagaaataagtacactaaggtgggagtaattaaccagagagaggtcatgacacttgatctgaatgacgagtactcactgggctagaaaggataacaaagacattccaggaagaggaaagaacagttgtaaagatgcatatatgtttatttcaagaatacaagttaaaatttaatttcttatttattgaaggagccacaaataatttgcctggctgaagcatatggtgtgtggggtgaagtgatgagggatgaagttggacagagaggcaaggaacaactggtacccagccttgaatgccatacacaggaacttggacatttccctttaggccagtggtcttcaaagaggaatgtgggcatgcagagcattaggaggagagaggaaactggaatttttgtttttttatgtcatccttttaaatgtcaattttctgtatattatgtaataaattagagcaggaattcatgcatatgtcaggggtgcatgattaaaaagagctcaaaggttattgtagctgatagagtccggatagggagtaggatattcccaagggtttcaatcagggtagaaggatcagatttgcattttaaagcaagttttctggaatcatataggagatagattagagaagatcaggtctagactaaaaaagatcagttgggaaactattagatttgaattcagccattgctagaatggagggaaagacacagattcaggaaactgagtagaataaaaagtcactatattgttcctttttattgctgaattaatatttcattgtatgaatataccccattttgtttatccactcagcagctgatggacatttggattgtttccaggttttgcctattttgaataatgctgccatcaactttcttatgcaagtctttgtgttgacatacatttttatttatcttgggtatatagctaagactagaatatatggattgtatgacaagtttgtgtttaactttttgagaaactgctgaactgttttctaaaatggctgtaccattttacgttcctatcagcagtgtgtgagggctgcagtttctcctcatccttgacaacactagttagctcttacatttaggtctgtgatccattttcagttaagccttgtgttcgtgtgagttaaaagtctaccttcatttttttacgtatcgatattcagttgtctcagaaccattttttggcagaccttggggctctaggctgcaccatgcccgaagtctccctcacaagccttagaactattttttgaaaagagcttcttttccccattgaattgctttggcacctttgtaggaaaccagtgaccataatgtaagagtttttttctgaactctcaactttgttccttattgccagtgccacactgccttgactagtgtagcttcgtagtaagatttgaaattgggacgtctaagtcctccaacctactactttttaaaattggtttgactatttaatatttaaggtccttcgtcttttcatataaattttaggatcattttgacaattctaacaaaggaaagagcctactgagacttgaatagggatggttgtgttgcatgtatagatcaatttggggaaaattgtcatcttaatgatagtgagtctttcaatccatgaacatggaatgtatccatgtttgtttaagccatcttcagtttttctaagcagttttgttgttttcaatatgtgagtcttaaatttattccttaatatttcattcttattgagtgaatttcaccatgagcatgttaaatttgcagtatctgtaagacattataggtggaagtgtccaatgggctgttgaacctcaggagaaggatctgagctagatttgagagtagccagcatgtaggtgggaatggaagcccggggtttggatgacgttgcccacaaacaacagggcagaatgaaaaaaagttgacaatgcatagaaatctaggaagcaccaacattcaccagacaggcacgagaagagagctagttgcccatagtggaggcaaagaggaaaatgtgataaggagaacatttcaaggacatgtcaagaagcagtgtcatattgttgtggagaaggcaaactgaaatatagcctgagaagctaattggtgatcttaatgaggacactttcagcagcatgggtttgtgtgtgggggtgctgggggtagaaaccagatggcagaggattggaatgagtggactgttctgccttgttcaccattgtgactcaggtgcttggcactttggtgcttattaaatatttaaatgaatgagggagtagagacaatgctttcaaaagctaaggctaaaggaaggaaagaagaatagttagaggagagagttaggttgaagggaggatttttttttttaattttgggaggaagttgagtatatttgtatgaaaaaggaacagaagctatagagagggagaggttgaagatacagtgagagtggctgattgatggagctgtgattcagaggggaccagcgggagtgggatttagaccatactattttcaaaaaggaaaaatttgtggagaagtgtttgtaactattagaattgatgacttaagatacttattaaaaatatatagcacattccaagccactggttagtgttgctgaatttgaaaaaacctttaggctaatgctacattaaaaatgaggtaggggaaaattatagatgccttgtgtgttatgaaatgaactatatttttaatttttatgttactactttcaaacagcaagatttcatctctcttttgctgtgttactaaagcatctttgtacctagatgacaaattctgttggatttagttattttcagccttccctcccctccattttgagctgcatttggtatggtcccagaccggtgcatacatctttgcacactagagcccctgagagcttgcattttgcttttatagaggcagtagattccaatgtatatctgcttaagccatcagcaaaaaactaataggcttactacaatttctttggaaaaacctgcttctggcttcagcctcacttcctttgttctacatcccagaagatgcacgtgagggcagctgcctggtaactggaggcttcacttgaccagcactgagcttctgttcactccttcaggtctcacatccatgtcatctccaggactcaccgaaaatagtcagagggatccctgtaggtggaactttattttctgtttttcctttgctgctttcctttgaaatgtttatttccatgcctggatacattgctgtatttgcatggtatgcagatgatatattattaaaaagcagaaattaaatttcaacttgacttgaacctacaagtagtacatttttatgagagcattattagttctttctattaccaacaagtaataattactaaattaatacctaaaataagtttaaaatgttgcatggaaatgtaggacttttttttttttttacaatatgtgtcttttcatgcatcaggtgaaattaatcaaactgacattttttatgaagcaatatttgtattaaaagataaatataaaataccaggaaaataatactagctatttgaataatgaggctggtacagctccataaaactaattcggcatcccttgctgctagtatgttcattttccaagaggcagttaatagagttaaatatgtgagccatatccaaagatagtataaagttaaaattcattctatggtactatatggatttatctaaaatggctgattttcaatatggattttgaaaaatgtcataatgcttcatacaggttgaatatatatatatatatatatatatatatatatatatatatatatatattcttttcataatttcatataacttcagtgtattccttatctgttagccagaggctgtggttttaatgacatctctgtgtggtatttatatatatatataaatacatatataaggatattgaagttgtggaacttactgcaaaaaatacctgaaaaattaactgtgcattttttgttgagtaatttattgtactatccatgggggtggtaactgaggaataatttttaatagtgattgcattttttaaaactccctgttatttcttttagttggcatacgttatggcatgttatatacatcatgccttgtcaggtagaagccacttctctgtaaatgaaaaaaaaaaaaaaaaaaaaaaagaaatacatgttgtctctcatctatcaaggttattctctttttaatattacaaatttgaataaggtatatcaaacttaagagaaaagttccttctttgtgtccctctctcacgcctgtgtatgtataacatagcaaaacctttcaagcttagatagacatattaacagaagtaaaatgatagctcaggaattcattataaaattggagcattaatggaatcaaattctaactagaggttttaccacattcttattcattattaagtgttcaggaaaaaacttatcagtgagaactttggcatttatttttaaagtatttacttatagggaatgtatgataaatgacatattttctcttctctcagtcattatcttaaataatggttctaagagtaaagatctgcatataggtataatctgatattcaattttaatattttagatcattcatctaagaaattgctccttgaaaatcatgatttgttggtaaatactggcaagatttttgaggtgtctgctcatctttttctcatatgtcaatatatgttaagtgtatattcgtttttttaaaagctggcttatatttatgtaacagtgtttaaataaagttagtatctatatcctgtaataccaaaatatttatatcctgtttgttaattttggctctaagacagtttatttctaagacggagttgattgtttattctaataccatgtcttaagttgtcatactgggcatgacctgaaattctctaagacgatgttctatattgaaggggaattggcactttaacagcttgtttaggtattaaactacataaaaatagagcatcaagattagggttgtgatgcttaaatgttacttttctgggatttcttgtaatgatcatataccaccattgtatgatcaataattatagcaatagagtattttagaagtgaatcaggacaacgttttgttgtctatcataaatgtttggtatcatgaataaatacagctattctgtttcattacctttttgctggaacatggtataacttgacagcaaaaattatacctttcagaaaactaaattttaaaaccacaaaaagaaatctttgaaaattttagctgtcagccttaacaagagactttgtctgttgaattcatatggagcttcatgattttgtcttagctttttagaggtgtgtgctggaaaataacctgtgggatcttgtagctctgctgattaaactgttgaaggcaactgggatggagtttgtacttttctcagaagattggtagttgcctaatggtttttataaacttctagagtaggggagaagtcaagtggccaactgagctgagaaactctcactcctacttaaatattcatctggctttccctgtaaaggtatgcctatagcataaatataagtatatgggtgggagcagtggctcacacctgtaatcccagcactttggaaggccgaggcaggaggatcgcttgagaccaggagtttgacaccagcccagggtaacataatgagacccccgctctacaaaaaaatttaaaaattagccgggcatggtggcatgcacctgtaaccctacctacttgagaggctgaggtggaaggatcacttgaggctcaggagtttgaggctgcagtgagctatgatggcaccactgcattccagcctgggcaacagagcaagaccctgtctctaaaataaaataaaatgaatcagcatttgaaatttggctaatttgtttttatttgagaaggaaaatggtgtttaccctaagataggggaaataactaaagaagcattggaataatattgaactatttaatatccctttgtattcttaagaatcatttaaagtgttgtataaaagagtagcataggatacttaataatatgctattcactttcaagtctctaattccagttttgaaaacctatgaaataaatactatggtagataaaatggaattgaacagtcagaaacttactacatgaagatgactcatcagttctaattatgtttatttttaactgaaaataaaagtatatgtaataagaattatcgtagtaattgcaatgatgtgatcaaaaaataaataaccaccaggatttttttctttcatttagtaaaattaatgtggcacagaatatcagtcataccattataggtatataagtataattctgtttatttctattaaaactctaataaattagtgaaaagaaactacttattaggcatgtacatgtgttagctctgtactttgcatttcatagttagtaccacagtatctcaagtagtatcaaaacaaccctgtgagatgagaaaattgagacttagagagttaaacaagtcacccagctagtaagcatttcagcagggatttaaacccaggaacgtctgccctcaaaacctgtgtttttctcacttcaccacagtcattcctgggacgtgctaaaatgtaaacaatagaatttagacaagttttgagtttccatagtgttcagtgttctttaggtattgcatttatatccagtccctttcccccattctctttctataccgcaaactttgaatagctaagtagcatattgagatttcatctttaactgtatttgaactgcttcctggtcttgctgtgtaatgctcctttaatacagggctattctaagaataaaacccagtgtttaaaaaaaaaagatgctgatttatgctgcagaaccctggaaagattcctctgaatttgagatgtgggttgaagctcagggcaggattagaagaaagactagtaaggcctctagctcccctctgcacactgtgtcccccttggacaggaaatatttgaccattcttaaagtcaaatcttctctattgcagatgctgatttctgcgtaacagttttaaaagaatttctgcctgggcgcgatggctcatgcctgtaatcccaacacttttggggggccaaggcaggtggatcacctgaggtcaggagttcaagaacagcctggccaacatggtgaaaccctgtatctactaaaaatacaaaaattagctaggcgtgttatgctcctgtagtcttagctactctggaggctgagacaggagaagtgcttgaacctgggaggcagaggttgcagtgagccaagatctcaccactgcactccagcctgggtgacagagcgagactccatctcaaaaaaaaaaaaaaaaaaaacagtcgggcgcggtggctcatgcctgtaatcccagcgctttgagaggcccaggcgggtggatcacgaggtcaggagttcaagaccagcctgaccaagatggtgaaaccctgtctctactaaaaatacagaaattagccaggcgtggtggcaggtgcctgtaatcccagctactcggaaggctgaggcaggagaattgcttgaacctgggtggcagaggttgcagagagccgagatggagccactgccctccagcctaggccacagagtgagactccgtctaaaaaaagaaaacagaaaaagaatttctggcagtctccccttttctacttctttctagccattgtatcttagaaaaactttgaagtcctgtcatccaacacctcgtcccatgtagagtccgtttatgagcagtcctgaaggtgtttacgtggtgtgttgacagttcacactctctaccaaccttctaaggcttcagagttgtagttccttgaccttttcttttcgtggtagctgattgtagatgctttattctcctggtcattcttgtctagacccatgctagttttccaataccccatataaaaatggtgtttgtacctgcacagtcttctagaaacggtgactgtgactatagctttttagtcaccttttctgccagtcagctcatgtttaactacaatgcccagatctttttaacatgaaagtgcccctagtctttatttttaaaataactgtaaaagcaatgcatccccattgaagacaggaaaatttaaaaagcttctgggaaaaaaattgaatcactagtctgcaatagcctcaaacatttttgaggtttatatacacacacacatatatagacatatcatccaaaattggaatagcatacaaacaattttgtttcctgttttttccccttatgaaatgagcattgcctcatgtcattaacatactgttttcctattgttggaaatttaggtagttgccagttttatgctaagcataacttgtgctgtaataagcatctctatacgtacatagatagggccacaattttttacagcctaagtgtattacattttttaaggctcttggtgtgtattcatcgttagctttttagaagggttgttccagtttatactttcattagcaatgtctgtgactttatctatttcatagaccctcacctgagtatttttttcttgtctttactaatatgaaagcaaaaataaaatttgattattgtttgaggtgtgacgggaggtaaaatgtgatttatcggctttttattgttgttatgaactgtttttgcttctggctgctttcagttgcagttttagtgtacttgtagatttgaatgaaggggttacatattaagggtttcaaattgtcatatttattgcagatatttatcttcaactaattatttgccttttaattttgcgtggttattacacacagaagtgtaatattttttattcaaatgaattgttttgcttttattattttaaatggacacataattgtacatatttgtgtggtacactgtaaagttttgatacatatatgtaatgtgtaatgagtaaatcaggataattagcatatctatcacctcaaacatttctttgcattgagaacattcaaaattcactcttttctttttttctttttttgagagggagtctcactctgtcggccaggctggagtagtgcagtggcacgatctcagctcaccacaacctccgcctcccaggttcaagtgattctcctgccttagcctcccaaatagctgggattacaggcgcctgccaccatgcccagctaatttttgtatttttagtagagacagggtttcaccatgttggccaggctggtctcaaactcctaacctcagatgatctgcccgccttggccttcaaagtgctggaattacaggcgtcagccaccgtacctggccaaaatccacttttatagctatttgaaaatatacaataaattgttatagtcaccctacagtgctatagaacacaggaacttgttcctcctctctgtaattttgtatttgttaaccaacatctggttaactctccgttcccagcctctagtaaccactattctagtctctacttctatgcagtcaagttttttagcttccatatatgagtgagaatatgcaatacttgtctttctatgcctggcttgtttcacttaatgttttacaggctcatccatgttgctgaaaatgataggattttgttcttttttatggctgaataatactccattgtgtatacataccacattttctttatccattcatctgtcgatagacatttagttgattccatatcttggcttttgtaaatagtgctgcaagaaacatgagagtgcagctatctaatcaaaatactgattttcttttctttggtaaatatccagtagtgggattgctgaatcgtggtaattctatttttagttttttgggggcacctccatactgttttccataacaactgagataatttacagtctgaccaacagtgtctaagagtttccctttctccacatcctcaccaacacttaccctttgtctttttgataatggccattctgactgtaggagatgatacctcactgtggttttgatttgcatttccctgatggttagtgatgttgagcatttttttcacataccttttgggcatcaaatgaatatttttaatgataccttccattgcttttctgcatggaagattctctcccaatcctaagaaataaatattagcttgttatttcttccagtttttattatagtttacttattactttaactctacttaatctagaacttattttgatttacagcatgaaatgaccactcaatattttgccatataagtcattaatttttttagtactatgcaataattccttacttttctctccctctgttgctggaaaaaatgtaattggttaaattccatcctgcctgcatggtgtatgcccccgagcagctgaatgtagctagaagaaaacataacatcctttcctgagttctcacttcagatgttgtccacaattcactagaaagccttcatccaggctggcaatcctagtacattcccctctgcgcactaggagaatgctcttttctcaaactgggacatcccctccctgatcccattcctcattgctttcctctgatttcactgaggaactggaagcagtcagaagagaagggctctgtgctccctgcactaacaccccctcctcccagcgtcggcttactctggcttcctcgctggcaccgtggggactgtccctgcttccacagcaagcccctcagtgtaggcgctggactccttccttctctcctgcctaagggctttgctctggcagcgttgtcctctctcttctgcaccatcagtgctcacctctctgcagaatcgtctggcagttgttcgtactgtccacatacttcactattcttttccttaatcccttttgcctgtaaaagtaaacacatgactaataaaactgacattaccacccaaattatgttggctacaatatcttggaaaactacacttggagaactacacttcaggattcagtccaagctctttaccttcccaccggagatgttgaagtgcctctggggttaatccttgggccttttctctcctgcattcttattcagtcccaaggctttaaataccacccaatgctattggctccaatcctggcctcacccctaaattctagactggtttatccagctctccgctcaagagtcctgtgatggtgctcactggcatcttaaactcaacctgtcaaaatctgcagtcttgagtctcatcctgcctgcttcttggctcttctgtcttctccatttcattagatgatagcgctgttcatccccaggcttaggctataagagacatcaacaaaaatgctgcatgagtcctctcttgccttacacatcagttcttcagtaaatccagccagtgctgcccacaaactgcctctcaccgtttcttcctgcctcccctactactgcctacactcggcactgttgtctctcctctgggctgccgtgcgggcatcctccctgggcttcctgcctctgcacttaccctccagagagagcatcacctcctcgtgccaaactctctgtggcctcccatcacatgtggaatacctcccgagtcctggcttgcgaggccctgcagggcccagccctttgctccctctctggccttggctcctctgctgcagctctcagccattttgctccctccagcaggcccataggcccaaccaggcctccagcttttcccaccgcctgtcctgctcttcctgtaggtggtggcctggctcgttcccttctgctgctttctcaaggctctccacattttactttgtatatcattctctctctctctttacctgggtttattttatttgtgacctggatcctcttttttgtctaaaatgtaaacctaacatacatttatctggcttttctctgctctatctgttgggcctagaatagtgattggcatagcacccaatacatgtcgtctgtgtggatggagttctgtaacagagttgtatctctttgctttcttccagtggctctccagttcttacagcgatgtctcagtcatttgagcctcactttcacaactttttttttttttttttttttagagacagagttgtgctctgtcatttaggctggagtgcagtggtgtgatctcggctcactgcaacctccatctcctgggttcaggctattctcgtgcctcagcctcctgagtagctagaattacaggcacacacctccatgcctacctaatttttagtacagatggagtttttgccactttggccaggctaatctcgaacttctggccttaagggatctccccactttggcctcccaaagtgctgggattataggcatgagccactgctaccagcctaaaatacatttattattataaatggaaaaccaatatcacttgacatgaatagaagttaattgcaaccataggccgggcacggtggctcatgcctgtaatcccagcactttgggaggccacagcgggcggatcacctgagctcaggagtttgagaccagcctggccaacatggtgaaaccctgtctctactaataaaaaatacaaaaattagccgggcgtggtggtacgtgcctgtaatcccggctactcgggagtctgaggcaggagaatcgctttaactcgggaggtggaggttgcagtgagccgagatagtgccactgcactccagcctgggcaacagagcaagactctgtctcaaaaaaaaaaggaaaaagaagttaatagcaaccataaacacataaaactgtccttgcccacctaaatggtctcgcctataatatcttagaaaactgtggtctaggattaagtctaggctctttaccatagtagacaaaagtcatcccgagggccatacttgtgtctcctcctcctctgtgtctcacagctcatgggccagcagcacgtagcgcaacatcttgcatcagcttttgtgcacactgacccttcttcatggagtccatttctttatgctcttcacctcacagggctatttcctgtttccctctgaaactgccccatctctccctcttctgggaggtccccctcaaaagctcatgaggtgcacctcccacatctattcatcctattaagttgtggttatctgcacagtgttttttcccctccatgagtataatttgctgagtgtatcttggaccagacagtattttgaaaagtgtttttctcataaaactcaaagagaaaacatatgtcacactgaaagctgttttggcctccaggtcccacagctctggtagctacttcttcttttccaggggtcacttttcagcagcgacattttccctgcaacttttgctgattccattaatttgttcctttgtgagacaaaatgtcagttacaactggaaatgttaccataaaattaaagagaagttgttctgtggtctcttgcccataacaagtgattttggagaatggtggcaacgtggtagggaagagtgggttatttggttttcttttttacttgttagtttctctcatattcagtctgttctcagattgtcttgtttcagcattaataattaccttcagaggattttgtcttgtattacaccctaaataacaaatttgttttgtttattcagacttgtggtaagtaggtttatattatattactgtatacctttttttccttcaaatttaacactggaatagcccaaataagttttttaaaaaaggttttcatgaaagtcacacgcagcttggctttcctgtagtggattcggtttgtgtagaaggaacagagtgaaaacatcactggtttctggaataggacagtttgggctagtatggcagtatcaagtgctctgtattcagagaacatatagcaggaaattatgtttatgtttgtgaaataaatctgttttcaactgtctgttcagaaaaaattagtactaataactggtggaaaacattcgaccatactcagaaacctgtcactcttgttttagggttggattgaagaatattgggaaagctgggacactttgttttaattgagagaaatattagagggtcctaccaccagctaataagtaggtttgcgtttttttcatgaccaagtaattccagagaaactcttcctttgaatgattagacacttcactgtcctcctcctcctcccccacaaaagttttttgagcatttgagcggaacagcttgctgagggcagtgctctgtgtgctgaggaatgtttatttctgtgcacactggagagtgtgacaatagattcacttcgaataatttttggtgaaaacaatatgctcagagcaaactgaaataagtgaataacaaggcatctaaaattatatggatggtactgtgtttacctttagatgtcagaaccttgacagctccctcgtgtgatagtgcgtccttccctgctcagcctcacttattcttctgtctaggagagtcttctttcccccaggcaactcctgcatatactgaaatccggtgatccatctaggaaagacttgtgtttactgttcttgctgtctactctgccccatgctaaggatgtgagatgaataaggatgcctccaccagtgtttgtgtctttagcagctgttgtaccactttgcacacagtaggccctcagccagtgcttgtggaaaccatccatttatggagcctctgcattttctccttgtaactctttgtgtttttgtggtgatgcagagaatccacatggggttctggtgtgtgtatctgttccgattttgaagatgtgagcatctcccgagacatgatctgtttgtacctgtgaaatacttaaccgtctgtatttattttcttttaacaaaggagagtctgggcgcggtggctcacacctgtaatcccgacactttgggaggccgaggtgggtggatcacgaggtcaggagttgaagaccagcgtggccaagatggtgaaaccccatctctactaaaaatacaacaattagccaggcatggtggtgggcacctgtaatcccagctgctcgggaggctgaggcagagaattgcttgaacccaggaggcagaggttgcagtcagccgagatcgcaccactgctctccagtctgggtgacagaacaagactccttgtctcaaaaaacaaacaaacgaaaacaaaacaaaacagaaaacaaaggagcagagcttctccttttgtttgttttttttttcttctgagacagactttgctcttgttgcccaggctgagctcctgacctcaggtgatccacttgcttcagcctcccagagtgctgggattatagatgtgagccactgcgcccttgtcttttaaacaaaggctgcttctttgtcttttaaaatagtgctgggagcctctgttcctgttgttaaagttagtattgtttatagactgaccatactctgtttttcatttttaaggattttccaatggactctttactgtaatttatataatctcttattagagttaattagccccagaaatgttattgatttgataaatctaattattgagtttaaaatggtctttgagtttttttcagtatatatcatgtatcaaaaattttctatatggtgataaagatgtaaaagaacaatgtctacttcagtaaactaatgttgatcattgtaattttcttgattttgatattgactataaaacatacctaaaaaaaagtaagtggacaatagccttgctactatttaggggataaacatggtttaatctttaaaccatgtattttagattaacccaaatatatgtgtacatattaggcagtgtagcagatgattaagaacatggaattctaggtgtggtggctcacacctgtaatccccatatgtttggaggccaaggctggaggatcgcctgagcctaggagttagagaccagcctgggcaacagagtgagacctcgtctctacaaataattaaaaaattagctggttgtggtggtgcatacctgtagtccaagctcctccagaggctgaggtgggaggatcacttacgtcagggaggttgaaggtgcagtgagccacgatcacatcactgccctccagcctgggcaacagagcaagactctgtctctagaaagagaaaaagaagaacatggaatctagagccagactgggagtgctgaaatgctagcttggatgttatctcacctctctgagcctcagttccctctctgaaaaatgaaaatgattaataggacctacatctttgaattgctttaaagactgcattgatacacataaagggtttacagctgtgcctggtatttacgtagaagtgctgtatataagagtaagctattattactacagagacaaggcaaacaggttaagtgacttgttttccattgtttggtttcttgtcttgtaatatataaagatataggaacaacagaaaaatcaagttgaaacctctccatgttacagaactgagttttctgtgcaaaatacatatggtggggagaagtctgctacaaccatgaaaggaagaccatcactcaggctgctgaaaagctgttagacacactgggtgggtttgactcacctttatcacttatagctgcatgtccttgggcaagtaacctaacctctgaagtctacttgctcagctataaaatgggaacaatatgttttttttctcatttgtatgagaaaaaaatgaaataacagtgctagccatacaataaatatggaataaatgttaaggtctttgtaattatgaattcatgctaattataattcctgtttatgtgactcctaaatctttgattagccacagggtgtcactttctttaatgaaaacaataaattaagataatttattagcttataaattaaggtagttattcacatggaaattggcttcagaactcaaactgtggtttcagaaacagtttattaacaaatgtgcaatagtagaattaaagtaattttgggaaaaatttgaagatatttagtgttaggatgagcactaactttgagatttacagatttgttccctcattcctcaaagtttattctgtacctgctaagtctaagtgcaggatgtaaagattaagaccaagtgtctagcccccaggaagttcacagtgcagctggaagacagtcaatagtgacaatactatgaattgacccctggggtttgcttgggctgatactgggttccagtggaggcctgccagaagtgaacagtgcctagaggtaatgcattggacatccttcagtcacttgtcagtaaacctgtggaattctgtgcatctgtcttgtgaatatacaagtatcttgcaaaagatctcacttggctactgaaaccccagagcagtggttattatagtaaaactaaaagagggcgggagagaggaacagaaggagggaaaattcttcatggatctgtgatttacaatctttaaagagattaatgtgaggtttaatgtgacaggtgatatacttgttcagtcttttaattgagattgacagttctttgaatgaacttgaactgtgacagccaaaatcttttcttttatgtataggcagttaaaagctttattttccctttttgttatgagagtttctaaatatgtacaatagagagaataagtagtacgatgaacctccatgtccccatcacccagattcagcaatcaacaaatggccagtggaaggtcttctggacctctgcctgtgccctttccacctcgatattttaaagctgattccatatgccatgtcatttcctctgtaagtatctcatgtatacctctaacaaaataagactgttttaaacatagccagaataccattattattcttaaaaataacataatttcttaatgccattaagatagatattttaatgtcaggtttgttagattaatgagtgaaatagatgttaaaccatatgttatatttctgtaatacctagtttactaattttttattttctaagtatgtggttttgaattggtctttattttcctgttgtctagttagcataccaccttagtttacattcaaatattattcaaatattattttttatcaaaaacttttaccccctttaagtgaaaatttacaaaaagctgtgagtataattagcttatttttaagcactcccaggaagaacagagtactgtaaacaaaaattatcggaaaagaaatttgaaggaaagtgactttattgcagtgaacagtttgcagtacagggagacacagcctttggtgtaaaacgaaggtggggtttgggttttataacaaaagtttcaccctggttcccagccaggtttatttatgcaaatgcaggattcaaacttgcttagttccagctggttgatatagctgagttctgatgggttcgttcaggtgacctctgaaagtttcaaagttgaacagaggtgtgggcttttggagaactcagagtacatgtgtgactgctagtcaggaaacggccacttggctgtgtattaaattgaaaagattcttgccctcaagaagctggcagtctacaaggaagaaacagaaaaacagtaagatagttgctttaatgagaatatatacctatgcattttggaacagaaatgagtctctcagtcctcttgggagtgttgggaaaggtgctttgatgagtgtgggtaaatggtcttttttttttttctgtaaaccttaacaaaaagtaaatcatagaatttggtgttgattgtccactgtatgccaggcactctgctggttagcaggtctacccctgtatagtaggcatacattttaacatgtgtacagacacacatagatgtatgtacacacaggtatacatacgcatgcacatatacagagaaggggtgagagggagggagaagggaagagtgaggtgggcggacaccttcatggagttttgtctagtgagaagagggagtttacaagcaataatcagcattattacagggacataatttaccaaggagtatagaaagggcagggactacctgacgtggtgactattaagtctgagactaaaggacaaaaaggagagaaccaatatgagtaacgagtgggcacgaaatttctatgcagaagaaactatgtgttcagaggttctcaggaagtacagagcttggcaggtgtgagaaaactgaaagaaggcctctgtggctggaatgtggcgagactggagaagttagcagaagccggtgtgaccctaacaggtctgttgcttaaggcctggcatgtcactacactgacaccaaggctttccgtggagaaggagtttagtaattatagagcagctgaaagaggagatgggaggaaaccgcacatcgcctccctgaggagtttgggtctagagattttaaggggtttggagtgggctgatgtctggggatcattgattggttgaagagtgcagggtgaggtcataggacgggagatagaactgcattctcacgctgatttcgttcctgtcggggcgggcgggggggggtcttaactggctgacttcagctgtaccactgtaattcagggtctgaagcacatcttaagcaattctttaaaaagtttatgattctaatgtcagcgatcctgtctataggaacagtggggatgcaaatgattcttaaacaaaaacgttatgattctaaggtcagatatcctatctagaggaacagtggggaggcagatggtcagtgtctagtgctatatgacttttggttacaaggaagtgggtcaaagtgcagcctgattacagtttaattataactatatttctgcccagaacttggcatgtaattcttgttagcctgtgaggatggtttcaccagatctcaaagggctttgtaaggggaaaaaagtacagttgactcttgaacaacacaggggttgaggggactgaccccattcccaaaggcaaatggaaatccttgtataacttttgactccccaaaaacttaactactaatagcctactattgagcggaagcctgaccaataacataaacagttgattaacatgtatttggtatgtcataagtataatatgctatattctcacaataaagcaagctagagaaaataaaatgtaactaagaaaattataaggacaaaaaaatattatttactattcattaagtggaagtggaccattatgaagatcttcgtcctcattgttttcacatagagtaagaggaggaggagttggtcttgctgactcaggggtggcaaaggtagaggaggtggaaggagaggcaggcacacttggtataacttttattgaaaaaaaaaattcgtgtataaatggacctgtccagttcaaatccatgttgttcaagggtcaatggtagtatctttttgttttccatgacaaagtttgtgtccgagacttctaaaacaaaagcagattaacaaaagaaaagcacacacatttatttaatataagttttacatgacatgggagccttcagaaatgaagatacaaagaaacagggacacctatgtatttttatgttaactttgatgaatagtggagatgcatggagaaatatgattggaggacgaaaggatatctctaaaattctctcagtaataaatgggagttgggggaacttaggaagacctgtttgttcagattcttttcttcagggataggaacattcctttattccaggtatacagaagatacctctctgaagaggatcttggacctactttaggggaaagttagagaattattttatggactatttcagagggaaagggcagagaaggtgagagtggccttcctgattctgctgttttctcaaatgccaaggtgtaccatattttggggcagcatgtcctgaaccccatcaagggcttaatgataatattatacatatattatcattaatccgcatagcaactcgtaatgttcttgttcctattttactgaattggagagattttaagtaactttccaaaattacccagctagtaagtggtgaagcaggagttttaacattattgttttgtcggtgaaataatccaactccataaaatattttaagaggtttattctgagccaaatatgagtgaccgtggcctgaaacatagtctcaaaaggtcctgaggacatgtgcccaaagtggttggcttacagcttgattttatacattttagggaaatataagcatcaatcaatacatgtgaggtgtacattggtttgatccagaaagatgggacaatgtgaagcgagggggcttacaggtcatacgtgaattgtacgattttctggttggcaattggttgaaggagttatcatctaaaggagtatctgggttaagataaagggttgtggagaccaaggtttgtttgtttgtttgtttgtttgtttgtttgtttgtttcccgagagacagaatctggctgtgtcacccaggctaaagtgcagtggtgcaatcatagctcactgtagcctcaaactcctaggcttaagcaatcctcccacctcagcctcctgagtagctggggctataggtatttgccaccatgcccatctaatttttttttttttaagagacaggatctcactgtgttgcccaggcttgttttgaactcctggcctcaagcaatcctctggcctaagcctcccaaagtgttgagattacaggcatgagcccctgcactcagcccactcagcctaagattcttagtgtttagatgaagactcataggtggctacgctaaagatgacaatagatggcaaatgtttccatttagacctttaaaaggtgctatactctcagttaaactcttcaggattgggagggtctggaaggggaaagacctagttatgttaatagggattcattcaggctgggcataatggctcacgcctgtaaactcagcactttgggaggctgaggccggcgaatcacctgaggtcaggagttcaacaccagcctggccaactggcgaaaccccgtctgtacaaaagttagccaggcaggatggtgggtgcctataatcccagctactcaggaggctgaggcaggggaattgcttgaatccaggaggcataggttgcagtgagtcaagatcatgccactgcactcaatcctgaacgatagagagagacggtctcaaaaaaaaaaaaaaaaaaaggagattcattccagatgcagattttcccccacaaaaggtagctttgcagggtcatttcaaaatatgccaaagaaacatattttgggataaaatattttatttccttctttatctgtcatgtgaggttatgctagagtcaggttggagtggtatcttattgctgcaaagagtttgttctgtctgtcttaggatctgtgttttaaagttagtgctggtcagcctgtctaaactccagaatgaagaaggtatgatgaggcatgcctgaccccctcttcccatggtggcctaaactggcctttcaggtttctttggaatccccttggttgagaaggtggatccattcaatcatttggggggcttagaattttttttttttttttttttttgagacggagtctcgctctgtcgcccaggctggagtgcagtggcgggatctcggctcactgcaagctccgcctcccgggttcacgccattctcctgcctcagcctcccaagtagctgggactacaggcgcccgccactacgcccggctaatttttttgtatttttagtagagacggggtttcaccgttttagccgggatggtctcgatctcttgacctcgtgatccgcccgcctcggcctcccaaagtgctgggattacaggcgtgaagaattttatgtttgtttttcagtcttggctttagagcctgtgatctttctactgcatgaggctgcctcttagtaaagaagcaaaatgcttgcagagtactctgtatttctcctctgaatgtttaatatgctgaacacttcacaataagtgctaacacgaactacatggtcacatgagatttttgttttcaaacagttttattgaggtataatctacaagccataaattttcccattctaagtgtaccattcagtgatttttaggaaatttaaggagttgtgctctcatcaccataatccagttttagaatatttcatcaccccaaaaagattcctttctgcctagtttcagtcaatcccagctcccaaccccagccccagataagcataaccagctttgtctctatagatttgccttttctagacatttcatataaatgtccagaatcctatgttacgtatagtcttttgtatttggcttctttcacttagcataatattttctaggttcatccatattatagactatatcagtacttcattgttttttatttctggtggtacccatcgtatggatatattacattttatttatccattccccagttaatggacatttggattgttttcagtttggggctatttaaaaaagtactactgtaaacattcctgtgcaagcctttgtgtgcacatgttttcatcctcttgcgtagattcctaggagaggaattgctggattctatgataagtttatgtttaacttttcaaagaaattgacaaaccattttccagagtgactttttacaattttacattccctccagcaatgtattagggtttcagtttctcctcatccttgcctacacttattgtttgtctattttaatacagccattgtagtagatgtgatgtggtatcccatgtaattttgtctttttattttcctgagacagggtcttgctctgtcacggctacagtgcagtggtgccatctctgctcactgaagccttaagctcctgagctcaagtgatcccccgacctcagcctcctgagtagctaggactacaggaacacacaaccatgcccagctaattttgtttacttgggtgtctcactatattgcctaggctggtctcaaactcttggggtcaagagagccgcccatcatggcctaccaaagtgctgggattacaggcatgagccactttgcccagccatgtgattttgatttgtacttctgtgataactaatgatgttgagcatctgttttaatgtgtttattagccatttgtgtatcttctttggtaaaatgactattaaaatattttgcctatttcttaggctgggcacggtgggcttatgcctgtaatcccagcactttgggagtctgaggcggaaagatcacctgaggtcaggagttcgataccagcctggccaacatggtaaaaccctgtctctactaaaaatacaaaaattagccaggagaggtagtacacgcctgtaaacccagctacttgggaggctgaggcatgagaatcgcttggacccaggaggcagaggctgcagtgagtagagattgtgccactgtactttagcctgggcaatagagtgagaccttgtctcaaaaaaatcaaaaaaaaagaaaggaaaaattttttttgtctgcttcttaattggtttgtcttattattgagttgagttttttaaaatttattttgtgtaagttctttatcagatatacgatttacagtattttctcccaacttgtgcattttcattttctcagtaatatattttgaagggcaaaagtgtaacagtagtaggttccttgcccgatgcacatggcaagtcaatataccgagccaccgagttacagcagaaaaaggtttacttgtggagccgctaaatgaggagatgggaggaaacctcaaaggggtctccctgaggagtttggggctagagttcttttttttttttttttttccgagaccaagttgcccaggctggagtacggtggcatgacctcagcttactgcaacctccacctcccaagttcaagtgattctcctgccccagcctcccgagtagctgggattacaggcatgtgccaccacacctggctaatttttgtatttttagtagagacagggtttcaccatgttggtcaggctggtctcgaactcctgacttcaggtgttccaccgcgggaacctcggcccagcctcagcctctcaaagtgctgggattgtaggtgtgagccactgcgcccagctggggctaggattcttaaaggttttggagtggaccgagtgtagggatcattgattagtcaaagagtgcagagtgaagtcatgggacagagagatgaagaaactgtattttcatgctgatttggctcttctgtggggatcttcaagctggttggcttcagcttttccactgtaattcaggatttgcttaaggaattcttaaacaaaagccttatgattctaacatcagagatcctgtctataggaacaatgggtatacagatggtcagtatctaacgttatgtggcattaggttataaggaagtggcttaagatgcagcctaattaatgtttaattataactatgtttatgtccagaattcttgttaaccctgtgaagatggctttaaaagtttttaattttgatgaagtccattttattattttctttttttatgagttatgcttttgctgtcatattcaggaaccctttgcctaacctgaggccatgaagattttctcctgttttcttcaggagtttcaaatgaggtattgtgataggttgggtttcactttattaggaaggtcataaaattcttctgtgaggaagtggtactttagctgagatctgaaagctgagtaggaggtaagatgggagggaagagattccagctagagggaagagcatgtgtaggtgggatatggccagtctgaagagctagaagcaggtcgtgaaggctgcagtgcagtgcatcttctggttctcagtgaaactcatttatgccatgtgaagcaatcttgctacagcagtagtctcagggaaggcttttaatgagcaatggaaacatgatcagatttgctttctagaaaaattactctggctgctgtgtggaagaggcttggaaggtggccagtatggatttggagtgaccaggtaggaggctgttggccagttagtgagaaacgatggcagcttggacccaggagaattacgcagattaagagtattagggacatatgagagtctgcctgcctttaatactgcatggtcagagattatggcctgcataatttaggagattgtaataagggtgattatgctagtttctatggcttctactccattccccggcacacttctcttttttgttctgctcattgagttttccttaccagaaaaagatagtcttaatagcctagacacagcaatttaaatattttcattgctttcctcctcttccataagactttgggaaaaaatggaaagcaacttatccatacatccatttgggatttctaagctaatggtgagaagtgtcttgctcagaaaactaaaacatttattatgtttactaagtgtttccattctgtgcatgtgatacctatgaacatattttctttttataaattttctgaagtatacagaaagtcaaaggtttctcaatttagattatagagaaacagataagtaaatgctgctataaattatgaaaaaaacacaacatgatattgttaccagaaaggggtcctgatccagaccccaagagagggtacttggatcttgtgcaagaaagaattcaaggcaagttcacagagtaaagtgaacccaagtttattagagaagtaaataaacaaagaatggctacaccatagacatagcagccccgaggactgctggttggctgtttttatggtcatttcttgatcatatgctaaacaaggggtggattattcatgagttttccaggaaaggggttgggatttcctggaactgatgcatcctcccttttccagaccatacagagtaacttctgaacatagtcctggcatttgtaaactgtcatgggactgctgggagtgtcttttagcatgctaatgctttacaataaatgtataataagcagtgaggatgaccagaggtcccttccatcaccattctggttttgatgggttttgactggcttctttactgcatcctattttatcaacagggtcttcatgacctgtatcttctgataccagttctgctaacctcctatctcatcctatgactaagaatgcctaacctcctgagaattcagcccagcaggtcattttacccagcccctattcaagatggagttgctgtggttcaaatacctctgacttattttctccttcccttttacaaggaaattttaattctaagggttgtagagggaggaagatccatcttctcttccttaggctgaatggggtgatgatattcccgcccaactattagcatctcttgtattcacggtagagagatgcttggtcagaaagcatccatatggtgagggccattcataactcttgagttctgaccaaaggtgatatttggaagactaataagtgttcaatttaataaaatattgagttaacttattctgcattcttacacaaagagcacaatgacagtatattccacaagagtaaagcaaaataagtaaaattatctcaagtaaactaaataagaaggctttccatgaactgggcaattgttggaactaagcagacttggagtggctgattctaatatgtgcctagaattacaatattgatccagatttttacattacctatccctcttgtttcttctgagcttgcatccagaggtcactggttggttcacaggaataagctgggtcagtctaaattgcagggaaaaactcaaaaacaacagacaaggctaggttctagtaacaggtgtactatagttattgaaacatagtttttctctctccagtctcccatttttactaaagacaaagcatgataggcttgatttgtttgcaaaataaactttagtcttattatacctggcctgattatttgtataaagtgcagcaagaataatttttgctgtataggctctttttaagttggctttgatggaactttcttccgtaaggaatcttagagtagacttcttattaaaggtttgagcccagccaggggtttgtgcttgcaaatacctgtgtgagttggataaattgtttccttctttcagggtcccaagataacctgggcctcctgagcctgtcagaaagtgacattctttacttaccacaggtcaagaaccctatgcagggactgtgtagacaaggcatgaggccagttttcccaaggagcttttattggctctgtaagtcaactttgattccttaaagaagcctgtttatatttgaaagcatgccatttcagtcaaagccttggtaaaataaccagtttctccaactgggccctgttacaaaagaaaacagattcttactgtacttatgcaaataattatattgccataaattacaaatacaaataatttccaaattctggagaaatcagatagagagaaagaaatatgcttcaaattttgtttacaggagtacactttacccaattggtgcaaaagtagttgcaatttcagaccatgaattttaaatcgttataactaggctcaaacactttttttttttttgagacagtctcgctccgttgcccaggctggagtgcagtgacatgatctcggctcactgcaagctccacttcctgggttcacgccattctcctgccttagcctcccgagtagctgggactacaggtgcctgctaccatgcccagctaattttttgtatttttagtagagatggggttccccctgttagccaggatggtcttgatatcctgaccatgtgatccgcctgcctcagcctcccaaagtgctgggattacaggtgtgagccactgcgcctggccccacatttttattaatcaaaatagtaaccgttacaatcaacacagtttggacaatgagaaataagtttattcctgtagcataaaaatccatgctttgggatttgacaaacttttgggaaacattttctgcatcctcctggttgtgggagtgttttccctgcaaaaaagttgtcaagatgcttgaagaagtagtagtcagttggcgagaggtcaagtgaatatggcagatgaggcaaaactctgtagcccaattcattcaacttttgaggcattgtgtgatgtgtagttgggcgttgtcatggagaagaattgggccgtttctactgaccaatgccagctgctggtgttgcagttttctgggcatctcattgatttgctgagtatacttctcatatataatggttatgctgggattcagaaacctatagtgcatcacaccagcagcagaccaccaaacagtgaccgtgagctcttttttggtgcacatttggctttgggaagtgctttgaagcttcttctcagtctagccaatgaactggttgtcaccggttgttgcataaaatctacttttcatcacacatcacagtctgattgagaaatggtttgttgttgttgtgtaggataaaacaagatgacacttcaaaatgacaatttttttgattttcactcagctcataaggcacccacttaccatgcttttttacccttccaatttgcttcaaatgctgaatgaccacagaatggttgatgttgagctctttggcaacttctcgtgtagttgtaagaggatcagccttgacgatcgctttcaactggtcgttgtcaacttctgatggctggccaccgtgctcctcatcttcaaggctcttgtctcctttgcaaaacttcttgaaccaccattgcactgtcagttcattagcagttcctgcgccaaatgcattgtggatgttgcgagttgtctccactgctttatgacccatttcgaactttgatacgaaaatcgctcaaatttgctttttgtctaatgtcatttccgtagtctaaaataaagataaacagcaagtagtaagtcattagcaaaaacacataaagtgagaaatgcccattaaaatgacctataacataacgacatttatttaagaatgtactgcaatatcaaacagcaaattccagcagtgcaaaacagaaattacttttgcatcaacctaataaaaactgtaaatagctcaaaagaaaagttttcttgactctgaaaaacaaaacagaaaggatgggcaacattttaagtagaaagtcataaacagattatttcagtgttttattcagtttatgcaattcccattttgctcaatatttatgaatacattagtttttcaagagagtgttggaagttctttcctattttattggcatacttttcaaagttatcagagacctgcatttaagagtactcatcagaggccgggcatgttggctcatacctgtaatcccagcactttgggaggcttaggcgggtggatcacctgaggtcaggagttcaagaccagtctggccaacatgctgaaaccccatctctactaaaaatacaaaaattagctgagtgtggtggcacgtgcctatagtcccagatacttgggaggctgaggcaggagaatcacttgaacctgggaggcagaggttgcagtgagctgagattgtgccactgcactccagcctggcgacagagactccgtctcaaaaaaaaaaaaaaaagagtactcatcagaatcttatagttgattataaaccatcctttgaagaggatcaaaacaagacaattgtggatgacaaaatgtctttgggcagccataatcaaagatgcaattgacaaggaaatttggttgcttctgtggtatacaataatttaacataatataattactgataacgtacactaagtcatatcaaaattataggtgtttccagtatttttggaacacataccaataatatatttatatagatacaacccaaagaaagccaaacacaacttcatatttaacaatgcttcctgtatgattttaatataccaaataagccaaatatatcattttttactttaggggactgatatctaaaagattaattaagaaaaagacatgatttataattttactttggaaagtttgtcaaatatcaaaggtttaaaacatttgatattataaaatagaatcctaggtcacaataagtcatttagccaaaatgataaagattttaaaaagacaaaaacctttacctgttaatacaggagaacttagctttccaaacaatctcttttttcctgcctcttttttgtagcttaggcaaacaaaaatctttcattgtcttttaatattacatgaaattcttcttcatgggccagatttcacctttgtatttgtgtactatgaatgttaaacccaattcttagtaaaacccttagataaatttgtccagtcttaatcagtttgaccataaggtaggattcctgtaaaccttttataaactgttaaaattttctgttaaataaaagattaatattctaagaaaaccctgcagtgcttttatttcaatattcaatttatgtaaaaactgaatattacccctttaactttagccaatgtgtttacacacagaatttcttttacaagattagtctttcacaaacctttcacaatttgctcaaaccttcagctttatcatatctaacttaaaacaatcctttaaccttttaaaccaggcaaaaaaaaaaaaaaaaaaattcccacccccatgccttcttatagtattttaccaaaaacacattctacttttaacacaccttacatgtaaaactgtttagccagtagtctcagttacgtatgttatggtattaactcttagcaacttttatttttggtaaaaatcctggtaggtaccaggtgtgaagcctaggacaccagacagaagtgcagacaaggtatgatgctttccagcatacccaaggggcatggccaactccacaggtccccaggccttatctagaatctaatggctccaaagcagtcaagctgaacaattttcaagtcaaagaagcagtttatgaccttaaagcatttaatccattcaaagtgggatggaatgacctctgaccaggagtttcaacatgtggtccctgggcaggatggaagagaggacagttgccctgagtgacagaaaagataggaaaggaaaaagggtgcaagagagagagagaagggaagggaaggagggaagggaaaatagcattgcctgaaatggggctgggcaggcgaggagctcagggaggccagggaaagacccacccagtgcggtgacactgaatcaaaagttcaggtggctgcttgtcagccacaaagggatcttgatctccagcatcttcatgagctcttaagtttctcctttgagaagaaaagtctccccatgtcccatgtgcttctgtacatgcccaattctgtcacccacagccaacagcaaagagcacaaggcaagttaatccaaagacttttaggccaggtgcagtggctcatgcctgtaatcccagcactttgggaggtcgaggcaggcagatcacgaggtcaggagttcaataccagcctggccaacatggtgaaaccccgtctctactaaaaatacaaaaattagctgggcttggtggcgcatggctgtaatcccagctactcaggaggctggggcaggagaatctcttgaacctaggaggtggaggttgcagtgagctgagactgtgccactgcactccagcctgggcaacaagagcaaaactccgtctcaaaaaaaaaaaaaaagattttttaactccctatttcttaggagggactctaaccctgctaaattgggcattttaacccggggattaacccaaagacctttaactgcctgtttcttaggagggattctaaccctgctaagttgggcctctaacccaattctgttctttaccctggacaaaatactacttacgcaaagttggccaattagtgctgcagtctattcttttgggtcggggtttctccagtgttgtcccttggtggtttgccaggaagatgttactggaaatgggtcccaatccagaccccaagagagggttcttggatcttgttcaagaatgaaggcaaattcagagtaaagtgaatgcaagtttattacaggagaaacaaaagctactccatagagcagccccaagggctactggttggttatttttatggttatttcttggtcatatgctaaacaaggggtagactatttatgagttttttgggaaaggggtggggattcctggaactgagggttcttcccctttttagaccatgtagagtaacttctggacatagccatagcatttgtaaactgtcatagcattggtgggagtatcttttagcatgctaatgcattgtaactagtgtataatgagcagtgaggacaaccagaggtcactttcatccccatcttggatttggtgggttttggcaggcttctttactacatcctgttttatcagcagggtctttattacctgtatcttgtgataacagtcctgctgacttcctatctcatcctgtgactaagaatgcctaaccatccttggaatgcagcccaggaggcctgagcctccttttacccagcctctattcaagacggagttgctctggttctaatgcctttgacaatattgctggatcattttagattcttaacatcctaaatggtaaatataggaccttttgaccatcaacattaagagattccagcaaagaggaaagtgttttatcttgtgtgcgtatttatgtaggggagtgagaaataaaatcctaagccccgtaactgactgaacagatctcctcttagccaaggggacccagagtaaccttgaaaactgagttcacagccatgatgggataggaggtcagacatgcctctcatatgcccccctccctggctaaccatgattaggctttctcacccaagggctaaggagcaaacagccctttcaaaagactccaccgctgatttcaaccaaccaccagacactgcttctcccttttgcggttttcgcataactgaccagcattttttcccataagagaccaccgaccacggaatggttcgggccagtctacagagactgcacagcaagggttttctggtcttcttcaccttttgacatcagagggcagcaatccacccttggatcttgctaatgccaccatttttttgtacatcagtcccatgaaggagcatgaagctccgttgcatgtgtgcacctttctcctttcataaatattcatgactcctcctacagtttattgaatatgtacatgtggccaccctgcttagcatcaatttctgttccctctgcccctccctcaaagtgtttgtgtctggcttctggcctgaggctgtgcttccctgcttgtcaggatggccaccctacaggctgcaacccttcatgagaaataaagctcttctttccagatttatgaacctcattcttcagttgacaggaggaaaaatatctttccctcacccatcctaggttcatggttaagacccctataacaaaagacagattaataagaaaaaagccactgggcatagtggtatgcacctgtaattccagctacttgggaggcaggggctggaggatcacttgagcccaagagttcaagaccaccctaggcaacatagtgagactctatctcaaataataagaagaagaagaaaaagaagaaaaaagcatacaaatttaatataagttttatgtgacatgggagccttcagaaatgaagacccaaagcgacagaaacttgatgtatttgcatgctaggcttgatgaagagtggacagctgtgtagaaatatgactggacaaagagtatgatgtaatagcagtcaactggggggaacttagcaagttctgtttgttcagattcctctctgtgtccctgcatcttcttcttatttgagatagagtcctttctctccatgtgtagggttggcgtctctcacatgaggatcttgtgtcctgcttcaggagaaaatgagaagatccttcctaggttttatgcctgcctcaggggagaagggcaaggggaaggtgagagcgatcctcctgtttctgcagttttctcagattctttcagcttcaaatatctaatacgccacagtgccatattttggggtattgtgtcctgaaccccatcacccaaaatcataaataaaaggaattaggcttaggaaaggaaggaaaaaagaaaaatgaaaacgacttaagaattagctttcaggctctgggtctgcttctaaggaacctacataggcttttataagaaaatttaagaaatggcaaagctgtctgaggccaaaaaaaaaaaagctcacttgtcaagagcattgaactgctttgcacatgaagaatagaatgaagttgttcctctgcatgtgaggaaagatagataaaagactttggaaggcctaaaacagtttatgtcaaaatgctaatcaagtcacttaccacttaccatctctctggaatgctgtgtggttccattttatctgaatttaaaacaatatctatcttgtatggtaccgtctttcataatatgaagcttatgttttcaaatgtctaaaaatcttgtattttcatccaggaccttttttgtatgctatttctgttccctctgcccctccctcaaagtgtttgtgtctggcttctggcctgaggctgtgcttcccagcctgtcagaatggccaccctacaggctgcaacccttcatgagaaacaaaggaaatgcaaatataacagggcagtattcctgactttacaaatcatttcatcaacttgttttacttgattttcaggcaaactgcttttttcataagttggcaagagtttttggatttttctcccctctcctgttgatgatcgtacaccaaaaaactaagcaatgaaataaaatgattgtttgagcttagatgaaactttttccttaagggggtatttcctgaatcttataccctcttactcttatttttttaattaatcgttgttcactcatttcacaatcacttttgagtttctactttgtgcttagaacatagaagacctgaaagtattccatgaaaataatttatttctgtgtattgaattgatgggcaaatcttcatcctaaggaatatcaacatgtgttatcaggagagttcatgaaaaggacattatcacatcacagttttcaaaaccatatgggtcttattttaggaatgttagctcagtttataagttatacttttcttacaaaataataggcttcttgtatatgacttgctgtctttttttcaagaaaatagagaaaggaggtctcactatgttggccaggctggtcttgaacccctggcctcaagcagtcctcctgctttgacctcccaaagtgctgggattacaggaatgaaccactgcacccagctgtgctgtcatactaattgggtacatgtaagggaatcctgtaatatcttggatgtgttaaacctttcattgaataaataatatcagcttataggttgtgtgctattctaaataaaccctcaatattccttcagcttctctgcctactttcaggtgtggtcaaccccaaagaaaggttcatggcatcattttgtgagtatgaatttgggggaggagttcagagggtgtattttattgatcatttggatgtgatttatttttggcatgctatttttaatgcattacagatttcctggccagcttttccatagcccttgggtaacgtcactttttattgaactgaatcttaagtgcaggtgtttttggatacctcctgcactgattccatggaccagtctgatgtcattgtccgttgcctgttcctgagagccccttgtagccacttcctgctcccacttttagccatgaggattgtacttgtttgtttccagcccatagaatggcatgctggtgtttcccgtcagctgtgctgctgtttcctgagctgtgtgctgtttatcttctgcatcactgcacctcaaacgtctggcctgctgtgactgctggctgtggctttgcgatcaagcagccagttgaaggcctactcctgtgtacttgtgaggctgctcctgatatctggcgtttactgtgcagtccccatttagtgattgctaccagtaccttcatcagactgttgccgagcgccaactccatgacaggcactaaagcttccatgttgaaagacacagtgcttgctctcgaggaacgtggcatccagtggaactatagggggcaagtgtgtggtagcaatggagaggtaccagctatgtgggagcgtggaggaaagagagcctgggtctccctggcctgtcagagaagggggcagtcgagctgagatgtggagggtgagtggaagttggctgagtgcaggcgtctgagcaaagggtcaaggcaattacaagtcagggcatggcttctttggagaaccatcaggtgttggctgtgtgtccttcttccgcagctggaaaagcggcttcctagggatacttcctgaatagcagtttcattgcaaagctattcttatacgtctttactgagcgtaaggttgttgtagccagtagaaaacaggaagagtgaggggtaaaatctctgaacactattttgaatcagaagtagcacatcttcagcatctcatacttgtcttttgcacgtccttgtcccaaggcattgataccttcaggtttgccaaaagctcctgctgagggccccaagcaggggtgtcctgtctcccagctgctgcattttttttttcacatcacctctctttctgctcatttaccccttcatctatagagcagttaatcttagagaagcagtaagggagaggtcctgataaactaattcatgttaagctttgaatgttagttttctcagagccccctgaatatagtattcttcatactgaaaaggacatattaaaacatgtaatctctaattggtgaaatctcaagaaaggtgacaaaattcagatgactcagcatgctgcccccacattgacagctcccctgctccgaccttcctcatgcagcatcttcctcagcttgtggactcaggaacttctccaggtccatcttccgtcatccctgtgggctgcaacaccagcctgcctgggaggggcagaatctgcctctcatccccatctcattagctggcagtgaaggactcctggtggaaggagggaggggaccaagacagctattcataatactgatttattcataagtcacttattcataagccttcaacagcttataattgaaagtgatatgtccccatttcaaaaatattttctggaaataatgaggtttccagcagatatgatcagctttcaagcatgctgagatttggctgtcactgaaccttttagaggcaggatatttccaactggtggcatgaggatatttataacaagaggcctttgaactcaaaagcatgttgagctttggataaatattttgtattgcaagtatatgcagtattttatttgaaatatatgtaaatgttgtgggaaacaaaattcaaagctatgtaaagtgctactgaattcataatagatttttgttgtcacatactatctcgtaaattgccaaaaaagtatacccattcttaaacttgaaaaggtttgagactcgttgtcctagattagaatttttggactacttaatttgaaatcaaggcagtatgagtggaaacatctctaaaggtgattgttttgaacatttttaagtgttcttcagtgacattcaaaatccaaggaaatctagcatctgaattctaattaatgttgataatcattacactaatggtaaattttaaacctggttttgatttcctggagctacactgatggacggtggggagctgcaggtatcagtagtcaggttccctcacctttggacaggaagttcttgaagtgaggtgggattggcgtagtcaggatctagctctggtggtggtacggcttgggtcaaggggcaagagccctgcccaaaaagattgaaagtgattccttgctgtagcttttttccttgagcttcaaaggcctttcagattctgtagtgtcctatgaaaatgcaaatgtccctgggaaacactaaacctaaaaatactgaatcttggctctgaagagttgaaaggatcttctcttgttaaaacttttcacaaggcttcggtttggtcgacagctagcttagtataaaatgctagaaaaaaagataatgcaacctagtgaggacaggacaatgagcctcaacaggggaggcccagagttgctgcgggggtgccagaggtggctaggagggctgacggaaagggcagctgccaggacaccacgtccactgcacctgccacccacatccagcctgtttctggattgcgatatttcggttcccttttttttttttttttttttttttttaatccctgagacaaagtcttgctctgttgcccaggctggagtgcaatggcgcggtctcggctcactgcagcctccgcctcctgggttcaagcgactcacctgtctcggcctcccgactagctgggattacaggcacccgccaccacgcctggctaatttttgtatttttagtagagacagggtttcaccatgttggccaggctggtctcgaactgctgaccttgtgatctgcctgcctcggcctcccaaagtgctcggattacaggcatgagccaccatgcccggtctcaggttccctttaaaaagaagaaaatcagctttgtttttctgattgtaatgctcaaattagagaccctcagatctttggagttaaacaaaattgtaggtgatattatttgcaactgcattttatttgcagtctggatcatgagaaaacaactgaagcttgtgtatttctccattcctggtagtgaggggttactgtcaaaattagtccacatttgtcaagtggttgcttgttcttgaatgaataagatagaaaaatatacatttttaataattaatgaaaacttaaattttacatctgaaggatttttctctcatgattaaaacaaataacaaaacccaaaccatagattttaatattatgttcaatcactattcaacaggcttttttctttttgttttttaaattaacattgccttatgtttagatgtgctgacatattaactgccttctttttttcctctatgtcaaaatttctttatatgagtttagtttttagatatttctcaagattcttttgtaacatagcagccaatttaaatcactataaccatagaaatgagaattgtcttactgagaaaattccatcaacatcatttatatactgaaatcaaaatgttggaaacaaggggatgcttttggtttttgtgttcttaagagttttctgttggcaaaaaacgtccttcctgccttccaaatgtgttatacatgggaagaattgtggtgtgtgtgtgtgtgtgtgtgtgtgtgtgtgtgtgtgtgtgtgtctgtgtgtgtttaagcttagagattaagaatagcaaatgctgacctgaatcctgggtctgatctattttaacacatagattgtgttgaacggccatgaatccatagcaggtagaacgcttttaaaactttttaaatgtgtgattatttatgttgaataacaagcataccaggttatcaaggttgggaagtttttgattaattcaaaccttttatctgttgatatttaccagtctgtcaaagatgaccaattttcaaagcagttagaatatactataaaatgttttaataattcagaaatctcttaaatctttgaataccttaggttatcattgtgattagctttgttatactgttggagtctgagagtttcgattaatagaaatttatggttaacattgattttgcatctcttcagcatttgttgccatattcactttctcacatctcactttgcttgtatgtattttttcttctctaaaatttttatttgccagagttttgtctattagctttgaatacaaatataattttatattgtttatgggaaaattaaatgcagatggcttgaaaacttctgtatgttgtctctgaaaatggagaggatgagaacccactctgttatatctggagttcaggacaaagcacagatctggtcacaggggatcttgcctccttctgtgtggaagccaccaagcacagggactggtaatggattccacagaatggcacagagttgctaaggaggaaagcctgccttaaggggcttatccgttattgtcacccataaggttgacaacaggcaattcttgtctgtgattatgcattttggttgctgctggagctcttccgttctggataatttcacagatattttcaagagttaaggagataacatttccgtcatttctatggattgtaccagctgcttcgtctgtttcccattgtataaatatttatacaaggtcaaaatgtaaatgaagtaatgcagtggttgcacagatgtagttcgtctagagcagtggttctcaagcagtgtcagcattacctggggtttggttagaaatgcaaatctttggcccaaatggattactgaatcagattctggatatggggtccaggaatctctgttcactagtcctgtaggtgattttgatgctgccaaatgtggagaaccactggttttctgtctgtacaacccttttgaatggactctttaataaataattttcactcacagacgctggcagttggtttatactactttttctaaagtcttttatgcagcgttttaaaaaaagcctttgattttgaaaagattcctgtagtgatctaaacttcttccattttttcccctcaaactgttaataagtaggccaattccatagttaaaattcaggaacatgtcagatgtggcttaaaaattctagaaattgggcttttgtctaaatatccataacacaaagcttctagactgaagttctttttagtcttaccaaaaaaaaaaaaaaaaagaaagaaagaaagaaaaagctgctatttcatgcggcattttagcatagtgtttctgtaaaaagcatctttgtcaacatatcactgaagagcattttcaaatggcgttgaaccattccttcgaactgtgactcatccatgtaggtatttgtcgatctcctacaggaagcagccttcttggtgctacctgtactcattgcagaagccaccacaccgtacccttaacctcctagtctgagcctgtgaatttgaacaagggtaataatttatgattaagtgcatttcttactgatccatttatcttacactttctggttcttatcattcttcaatcaatcacatggccaggaaaatgaatgtaaaaataccttcaggtttttgttaataattaaatcttattttcttgaaatgtcattgtctaactcaaaaggtcttagattccttaatgctaatctgatattcatataattatactaaaaacaagataggctttgggatcaccctttcctgctccaatcagaagtaaataaaaatagattctcagcatttaagaactggaggtggggccaggcgcggtggctcacacctgtaaacccagcactttgggaggctgaggcaggcggatcacgaggtcagagagttcgagaccagcctgaccaacatgatgaaaccccatctctactaaaaatacaaaaagtagttgggcgtggtggtacgcgcctgtaatcccagctactcaggaggctgaggcaggagaattgcttgaaccctggaggcggaggttgcggtgagccgagatcgcaccattgcactccagcctgggcaacagagcaagactctgtctcaaaaaaaaaaaaaaaaaaaagaactggaggtgaccttccgatccatattcagccagctccaccctcctggcgatgggaaatctgaggcctccagggtgcatngtgggaggtgagtggtgtgctgagacccgcctgcctgagctggccctgcagtcagaccccggtcttctaaactgccttgcccttcccataaaagctaaggtattgttgagcattctgtcttaactatttctaacaagcctcatacacatcttgttcctgcagtgttcattttgttaatactctagatagtggtcatttccttaaggtaattgataggaattcgaaaactgttccagaatactagaatagtgtttcctgcagcatggttttaggaaacagcatttccagtagctgttcctaaggacctaattttgtgaccaactcagtagttgccatgaattctttgttatgtaaaagttatttattctgactatctgcaaaaaaactgccattattcctaactactgtgttttaggtaaggatcatctttttttagttgcatgtaaaagtatagtacttgattaatgtgtgtaaagggtgtgtgtgtgtgtctgtgttggagcaagggttaagaaaagctctgtaaagtcatttaactttctttgaaaacgtgtgttaactttagcatgcacagaattgtttttccaaatgccaattctgaggaataatgttctataatactttagaatactcacagaaataatgtatggtataaaataaatatgtctgttttgaaaactaattattgatgaaggctggatataaaactttttaaaactgtagaaacacaggtcacagaagttgataccttaaaaattcatgtataaggaaaaccaatgccaggaaaatacttttacgggtctttttttttaatccagcctgagaaaatttgtattcatttgtttaagtgggggcaggagattgggagactttaaaaattgttgtgtataccttatttgaaaactgaggtaagaaaaaatgtaactgttaaaaatggtaacagtacaggaaaagtggtttttaaaactgcaaggaaatattgtgtattttgtcattgtctaacaagtcctcagtttctgaacaaaatttttctaaaatatattttactaagctcagggaactaaaagtacctttggaaacagcaattattgaaaatatttaaaaggaagctgaaacttgtttctgacaggcatccacattctggagaaaagagagagaaaaggaaacagtctgtacaattacatatcccttatctgaaatacttgggactagaagtgttgcaggttttggattttttccgattttggaatatttgcagtatgcacttactggttgagcatggctaaaacaaaaaactgaaatcctaaatgctcccatgagcatctcctgttagaatcaggtaggtgctcaaaaagcttcagatttcagcgcagggatactcaacctgtgttacaattagtaagtcccagcaaatgctggcaaagatgcagagaaactagctgactcacacagtgatgatggggatgtaaaatggaatagctactctggaaaagagtttggcagttcctttcaaaaccgaaaaatgaacttaccgtatgacccagcagttgcactcttgggcatttatgcaagagaaagtacttattttcatgtaggaactcatacacaaatgttcatgacagctttattcataatagccaaaagttggaaacagccattcagtgggtgaatggttaaacaaactgtggtacatccataccataaaattctactcaataataaaagggaacagattattatgtgctgtagcttggagaaaccccaaggcaattatgctgagtgaaaaaagcgagtctcagaaggatatatagtacatgattccacttacataacatatgaaataacataattatagatttggagtccagctgagtgtttggggaaggagggcatggctataagaggtgttggaagtaaatgcttggtgtcaccaagtgaaaatgacactcaggcaaaagttttctcagcaaggcaatttacttctatagaagggtgtatcttgtggatggaacaatggcgagagcacaccagacaaggaaggggaaggggtcttattcctaatgccgctagctcctactgctgtgtctttcccctattggctagggttggactgcacagtctaagctaattccaattgtctcttttaaagagagcaagggtatgagccggagtggcagggtgagtagttttggtggaaaggacagttacagaacaggtgactaaggatgcctaaggacagaacaggtgacagaggctaggagggggtcatttactgaaactaggggcaaggagagtaaagaatgaggaagttaaactttaaaatggagaacaaagaacagggaagctgaacatactgacatattggttctttgaagaagaactcagaacttattgtacttaacaatttttctccttcttgaattttaaaggaagttaacaggctaaactttgaagaggaatttactgtatcctgcaaggggaacctgagggagtcttacggtggtactgtattgatgtagtgcttacacaaggctatgcatgtagtaagactgcatggagctgtatgcccatctgcacgcacagcgcatgtgtgactggtgaaatctgaataagctttgtggattgtacccatgttaattgttgggttttgaccttataccagaattatgtaagatgttagcactgagggacattcaggatgtacatttctaggtaacatcctatgaacctataattatttcgaagtaaaaagctttaaaaattgagtattgcaatttcatatagtcatcctaatggggggaaaaatccctgatgggtatacaccaaaatgtgctagttgtagtcatctataataggaaaagtcccctaaaatagggactttcaccctattatttgtggaataaataattttttatggctaaaaattttcctcagtgtacatagttcatgcatcaaaaataccctattaaataaatgcagataggccgggcacggtgtctcatgcctgtaatcccagcactttgggagactcaggtgggcggatcacctgaggtcaggagttcaagaccagcctggccaacatggtgaaaccctgtctccactaaaaatacaaaaatgagccaggtgtggttgtgcacatctgtagtcttagctactcggctactcgggaggctgagacacaagaatcacttaaacccaggaggtggaggttgcagtgagccaagatcgtgccattttactccagcctgggcaatagagtgagactctgtctaaaaagaaaaaaatgcaaataattagaagcataaaaaatttggccaggtgcgatggctcacacctgtaatcctagcactttgggaggccgaggcgggtggatcaaaaggtcaggagatcgagaccatcctgtcaaacaatgtgaaaccctgtctctactaaaaatacgaaaattagctgggtgtggtggcgtgtgcctgtaatcccagctactcaggaggctgaggcaggagaatggcttgaaccagggaggccgagattgcagtgagccaaaatcgtaccactgcactccagcctggtgacagagtgagattccgtctaaaaaaaacaaaaaacaaaaaacaaaacaaatcataggtcccaatttttaaaatctgtcacattgacagaatttaatgtcttctagtggttatgtaatttgacagactgttggcaattgtttttatcaaaaaacagcttgaagagatgtttatttgtattcagaaaattgtttagagacttacagatatttcacagttctctcttgatcatgtcacatgtattttaatatcacaaaactcatatttcctaactcaatataaaaacacctgaattgtaaatattgaagttagtttttaaagtttattcttagtcttatttatctctaatgaacaatgctcttaatctttaatagagagattactagaatttttctcaattcatatgtagtaagtgttactgtttctcttttaacattttgaactcttaagagagaggcttatcctagttttctatacatgactcccagaggtttgggggcctttttcggtcattaacacctcactatatttattacctatctcggttaaaaggcttagttgtagagtatgttgaatatgttcctgaaatgaacttggttttttttaatttcatatatcttgtgccacccttatgccccattaaaacgtataattgagaattgattattccgtcttcactggtaatggaattttttgttgttttgagtaagtaagcatttgaaattgatagtggtaactaaagtggaagttgcagtcagataaaacttgagcaatgatctggagttgaaataaaaagacataggcctgaggtgataatggaattaaatgattactcttgactcgtcgtagaaaaactactgcatcttgttttgattttttttcttttaatctgaagtccatttgttgaagctcttaacatctttgtatttgtctggctttccccagtataataaatggcatcttaatgtgagcaaggggtcatttttccttgtagaaaatgttctgtaatttagatttttcagtcctcattctaaaattcagatgctgttaaacccctagatttgaaatttttccttcaaatatcctcccatcatttcacctctcccatatttggttgttttcttgatgcaggcccaattgatgatttcagtacacacagcacaattagaacatcctcattcagtcacgtcgctgagggcaaatgtctcttagctgttgggcagcaaagttatttttaaatgcccgctttgtgctttttcatagtcatcctgaatagtggctggtgtggtgcaactatactcggtcctcagtgaagctggcttagtgcttagccccgagatacaaaaagggctctgaaatgaagtggggagctggtggggacagctggggatgtttcagatacctagtgaggaacatgttttaaaacttaaaacagtgattgttttctcctattttttataagtcattttaaggccaggcacattggctcacacctgtaatcccagcactttgggaggccaaggcaggcggatcacgaggtcaggagatcgagaccatcttgtctaacatggtgaaaccctgtctctactaaaaatacaaaaaaattagctggcagtggcagcatgcacctgtagtcccagctactcgggaggctgaggcaggagaatggcgtgaacctgggaggcagagcttgcagtgagccgagatcgcgccactgcactccagcctggacgacagagcaagactccatgtcaaaaaagaaaaaagtcattttaagtttcctaatctaacccctcctcccttgtgaaggtcgagacatgattggatttcattctgatgtagaaaaaactgagataaactgaagggccaataattcagcaacacgagagaatcaaacttttaaagcagaagtagtcttgagaaaaatgttttttatgttatatatctacagaaaatcttaattctgttaaaacaagatattctttaattaaaacccctttgatgatttctgcattgatctttggttttgagctgcctattctggaattatttttcaaaagaagattagctgaactttgaagcagttgaagcatacttaatgtattttagggttgacttattctaatgcacttggcagccatgaatcatttgaacagatatgttgacaactgaagtgaaacaaatgaaaagacatcctcttcagttcatttttttttcttacgagtacactctaaattccttgcagatttattaagagtactgaaaggtaactaattcttaagcatctgagtggggcccagagcaggtgattttcagtgcatagtgagtcctggttcttggtaatatttggtgttgctccctcttcaagaggctgttgtttaaataatgctggtattaatattagctgccagctattggccaacattgtatgcttggtgattcgtatttgctacctcatttaatcctgccaacaaccttacgaaataggtgtttttaccgcacttgtatggaggagaagttgcaactctggtgaaatcagttatgtggaaaaagagtctgagactaaatcctgaagaggatttagctgcaggtcctttgggaggcgattccaagaagcaggagcgagggacagggaaagtgagacagcgaggaaaagaagctaaaagcaggaagctgctaaagccagtgaggatgtgccgtcgtaccaggatctctgagaagtgttgagaacgcctcctagaatcgtccacccaaaggatgttagaccagggtcctgagacactgacctctgtcacatgttggttgagaactgccttaattccacaaaactgggctgtgctggctaggttccctgagattcagagaatactctgaccagaaaaacagccacacaggcgtggctgtgaggtgggaccctctgtgcatcccaatgagcgcacacagaactggcttccatagctgcagctgaacgtagaggtagaccagagggctgtgccaagaggcgctaggagtgtaggacctgagttgggcctagcccaaaacctgtgagcacaagaaactcttcccactgtggcagaccgtcttcacgtaaacacatgtgggatgaggtagcaggaaatggagagagggcacccagtactggcaacagtatgagcagaatgcacagaggaaatactatgcatgtgattacatgctaattaggaatatttacttttcctatgttgctttggttagcattagtttgtgtttcttgcatgtatgtagatcagaatataagaagaaagcccatagtattctaagtattagacactgtacctgatttgagatgataaactccatcactgggttttaaggtctgccatgcataccagcttgctggactccggagttgagagtgtggtgctgggaatgtggggatgggcagggactaaggcagataacggacctcattcaccattgtccatggtaagagctgctgcgtttgttttgttaacaatcttgataacacccctaagatgttgatactcccctgagctgaaccagaggaaacaatgccttgggtgaaatggtttgttacagtgtatcccaggacagaaggtagctgaaatggtttctgcagatgactagattttccggagtaatagcacccaaactcagcggagcagggtgtctgccacagacacagggcaggagttaggaaatatttacgtaaggtaaggcactcaggttgtcctttttcatttttacagtcaaccagatttggtcagggacctgaattcatacagcctgtttggaataagcccatattgctgtgtaatagataaccacaaacataacagtttaaaatgaaacaaatttatcagcttccagtttgtagggcagaagtgtaggcaagctgtgactggattctctgcccagtattccatgaggctgagatcaggggtcgcagagctgcgttgttttctggaggcactggagaagaatctgtgtgagggcccttcaggtcattgccagagttcaggcacctagtgattgtgggatggaggccccttttctttcacctgctgtcagcccggggatgctctcagccccaggatgctacccacattcctttccacgtggccccctccatcctccaacccagcaacagataatggccctgtgtcaaatccctgtcacgcttcacatctttctccaagaaggcccagtgcccttcacaagcctagctaggccaggctcacccagatgttccccctttaaggagtcagctgtgccatggacatcacctaggcacagggtaaaatccatcccagccccaggcctagggagtgcagagcaggtacaccagggagcaggtctcagagccacctcaggattctccctgcacccctgtgaagtacaaaggatttaagatctaaaagcaagtttagaagtaatcctttacccatgtaccaggtcaaaaatggtaaatgtctgaccctgatttcattttttgtattctctgtacatgctgtatgagtccattttcacacagctataaagaaatagctgagaggggtaatttataaacaaaggaggtttaattgactcacagttctgcatagctggggaggcctcagcaaagttacaatcatggcagaaggggaagcagtcaccttcttcacaaggcagtaggagagagtgtgagcgtgggaaggaactgtcaaacacaaaaccgtcagatctcgtgaggactagtcactatcacaggaacagcatgggcgaaactgcctccatgatccaattactcccttcctcagcgtagggattacaatttgagatgagatttgggtggggacacagagccaaactatattattctgccccaggcccctcccaaatctcatgtcttttcacattcaaaaccaatcatgccttcccaacagtctcccaaagtcttaactcattccagcattaacccaaaagtcgtattttttttttttttgagatgcagtctcacgctgtcgcccaggctggagtgcagtagcgtgatcttggctcactgcaacctctgcctcctgggtcctggttcgagcagttctcctgcctcagcctcccaagtagctgggattacaggcatgcaccaccatgcccagctaatttttttttgtatttttacaaaaaatacatgaccaccatgttagtcaggctggtcttgaactcctgacctcgtgatctgtccgccttggtctcccaaagtgttgggattacaggcgtgagccaccgcgcccggcctaagccaaaagtcttaagtccaaagtctcatgtgacacaaggcaaatgtctagcctaggagcccataaagtcaaaagcaagttagttacttccaagatacaatgggtgtacaggcattggatcaatgttcccattccaaatgggagaaattggccaaaacaaagggtctacaggccccaagcaagtctgaaatccagcagggcagtcattaaatcttaaagctccaaaataatctcctctgacttcatgccttacttccaggttacaggggtggctcccatggccttgggcagctccttcatgggttggcattgaatgcctgcatcttttccagattcatggtgcaagctgtcagtggatctaccattctgggctctggagggcagtggccctcttctcacagctccactaggcagtgccccagtggggactctgtggaggtggtggggcagcaaccccacatttaccatttgcactgccctaatagagatctccatgagggctgtgtccctgcagcagacttttgcctggacatccaggcatttccatacatcctgggagatctaggccaaggtttccaaacctcaattcttgacttccgtgcacccgcaggcctaacagcatgtggaagctgccaaggcttgtggcttgcaccctctgaagcaatagcccaagctgtaccttggccccttttagccacggctgtagttagagtggctggaatgcagggtgccatatcccaaggctgcacagagcagctggcccctgggcctggcccacaaaactatttttcctcctaggcctcagggcctgtgatgggagaggctgctgccaaaatctctgacatgcccaggagacattttccgcattgtcttggcacttaacattcaactccttattacttatgcaaatttctgcagctggcttgaatttctccccagaaaatgggtttttcttttctgtcgcattgtcaggctacagattttctaaacttttatgttttgcttttcttgtaaacataagctccaagttcaaactatctccttgtgaacacataaaactgaaagctttcagaataatccaggtcatgtcttgaatgctttactgcttagaaatttcttccaccagatacccttaatcattgctctcaagttcaaggttccacagatctcaaaggcatggcaaaatgccaccagtctgctaaagcatagcatgagtgacctttactccagttcccaataagttcctcatctccatctgagaccacctcagtctggacttcattgttcacatcactatcagcattttggttgaaaccattccacaagtctctaggaggttccagagtttcccatatcttcctgtctttttctgagccctccagactgttccaacctctacccgtaacccagttccaaagtcccttccacattttcaagtatctttatatcaataccccactctctccagtaccaatttgctgcattagtcaatattcacactgctataaagaaatacctgaggctgggtgaggttgctcacacctgtagttccagcactttgggaggccgaggcaggcagatcacttgaggtaggagtttgagaccagcctgaccaacatggcaaaactccatctctactaaaaatacaaaaaattagctgggcatagtggcgtgctcctgtaatcccagctacttgggaggctgaggcacaataattgcttgaacccaggaggcagaggttgcagtgaactgagatcgcaccactgtcactgcacttcagcttggggaacagagtaagactctgtctcaaaaaaaataggtaatttataaacaaaggaggtttaattgactcacagctctgcatggctggggaggcctcaggaaacttatgatcatggcagaaggggaagcaggctccttcacaaggtggagagtatgagcatgtgaaggaggaactgtcagacacttacacaaccatcagatctagtgagaactactcactatcacgagaacagcatgggggagactgcccccatgacccaatcacttccctcccctgacatgtgagaattacaattcgatatgagatttgggtgggaacacagagctaaaccatatcacgtgccttgaggaaaagttaaactactggaaagtgtttatagctgggagatttggggttcttgcttgaatgaccaggtgaaggttaattatgttagtgttcttgccttgtatattactaaggcttaccttgaagggtcactggtcccttaaattataaaattttttcacatcctttcatatgtttcatatcaatattgggttaatatttctatcccaaattttcagatgagaaggttaactgattaggttgtgtggtcagtaaacactaaaaagccaagattaagcactttgtaatacaccatgatggctacatacttactttttttgttcccaagcttttttttttttttttttttgagacagagtctcgctctgtctcccaggctggagtgcagtggcaagatcttggctcactgcaacctctgcctcctgggttcaagtgattctcctgcctcagtctcctgagtagctgggaatacaggtgactgccaccatgcctggctaatttttgtatttttagtagagatggggttttacggttttaccatattggccaggctggtctcgaactccttacctcaggtgatccgcctgcctcggcctcccaaagggctgggattataggcgtgagccaccgcgcccggccctgttcccaactttttactgtggtaaagtacacataaaatttaccattttatgtgtacatagaattcataagtgtccagctgagtggtattaaatatattcatgctgtgcatccatcactaccatccatctccagatgtctttcgtcttgtaaaactgaaaatctgtacccattaaccactaagctcccacgccctctccccagccctgagagcacacttcgtgtctccatccatctgactgctctaggtacctcatatgagtggaagcacacagcatttgccttttcgcgactggctggaagcacacagcatttgccttttcgtgactcnggcttactgcacttagcatatgtgctccaggttcatccaagttacagcgtgtgtcagaatatccctcctttttaagggtgaatagtattctactgttacatacttttaacaaacataccttgagagcttactgtgtgccaggctctgagctgagtgacagcatgttgaaatgagtcatacatggtcacagtcttgcagggactccaaatccttagcaattgcactgcaatttttgtaagtcagctgcaaaagtctaaacacagggatgtggaaacatctggatggagcagcagactccactggagttagtagaaggacgacctgagaagctggtcttggaaggtgaacagctgtttgtgactgatgaatgggcgatgcgggtgggaaggtcgttccagcaaagggaacagcacatgcaaaggtgtggaacgaagggcctgaccctgaccgcccaggtagggggaggaagtgcagcagattgggggacaaggaggccagctgtacacgcagtcggggcaccagcccagtctgtaaacncggcatgactccatccacttggagggtggatgcgagcagctgtttatacccatttcctctctcagtcccttttcaaaccctaaccccagttattctgtttcctcagctgaactagatgcagagcacgcccagaaggtcctggaaatggagcacacccagcaaatgaagctgaaggagcggcagaagttttttgaggaagccttccagcaggacatggagcagtacctgtccactggctacctgcagattgcagagcggcgaggcgagtgggggctggggctgctggtgtggggactcaccggctgtgcggggtggcgatggacccctctccccagagcagggcatggggcagaatcctcagaagttccgttctgttatgagaccccagcaaccaaaatgtgtgcgtcgggccacctctctcttgccctgcttttgcctcttctatcagtctaagctttagttgaagatatattttttttaatacctctaaagattacagatacagccaggcgtggtggctcacgcctgtaatcccagcactttggcaggccaaggcaggcagatcacccgaggtcaggagtttgagaccaacctggccaacatggtgaaacctcatctctactaaaatacaaaaattagccggccgtggtggcgcgtgtctctaatcccagctactcaggaggctgaagcacgggaatcacttgaacccgggaggcggaggttgccatgagccgagatcgcaccactgcactccggcctaggtggcagagtgagactgtctcaaaaaaaaaaaaaaaaaaaaaagattacaaacacaaattatgcttctagagaacctgcaaaattaccaaaatggaaaaaaagaaaaatagcccttaattctccagtacagaatagtccctgttactgcttttcgtgtgttctttctagtctctgtcgagtctgcttatctaattggtatctgactggaccgtacatatatatggctttgtctctaacttttcttcatgttacatagggctctttccgcctgttgttaaaaatactataagaggttgtgtgtcaaaggctgcatctttttgtcatgatgtatcctaatatattccaccagttttcctagctgaacatttaaaatcttnccctcagtaaatagtgctgtaaggaacaagctgattagaagtccagacaccgaactccttcttcccagcttttcctttggaagaactgagtgactcagaggtgcagcaggggtgggcagggcagcggcactgggcagcttacattttccctccagcctgcgctgcacaggcagtaccagacccccggcagcggggagacccgtccaaaccttgccctgttttcctgccctcccattctcctgaacgtctcatcatcttctggacacctccctcaccccccaaatctcagccttcatcctttccccagccttgcctggccctggcctttgttctctctatcctgcccccaaccacatctcccaggagtgtttcttccttgtcatccagttctgtgtcccctccaaggagaggttaaagaaatccgagaatgaggccaggcgcagtggcatacgcctataatcccagcactttgggaggccgaagtgggtggatcacgaggtcaagagatggagaccatcctggccaacatggtgaaacctcgtctctactgaaaatacaaaaattagctgggcgtggtgacatgtgcctgtagtcccagctactcaggaggctgaggcaggagaatcacttgaacccgggaggcagaggttgcagtgagctgagatcgcgccactgcactccagcctggcgacagagcaagactccatctcaaaaaataaatacataaataaaaagaaatccaagaatgaggaaagaaaataatgttgagaaaaatagattaatagcagtagttgaagacttcagagtgtgctggtgaatgcagtcagttagttgtgtggatgatgcttgtttaccttccaatgcacagtatagatttgaagcttaacaacgttctctggagtcagcctttgccattcttgtatcctgcgaccctgcatttgtcctctgtgcgtttcctccgagcatacgtgcaggattctggtgcttccntgtttgctgcaaattgtagagagtggcttcccatggctcctttgggaggaaggagagggtttgctccagggatttttatcctgttaagggtagaaaccgagaaggacactgtcttaccccagctgccataacaaaacaatatggactgggtgacttcaacagcagacatttattttccctcagttctggaggcctcagatccaagatcagcatgctggcgcgatcggtttctgatgagggctctcttccttgcttatagacggcccccttctccctatgtgtgcacgtggccaacagtagggtggagctctctgctatctcttggtattagggctaatctcaaccacaggggccatgtccatctgacctcatctaacttaattacctcccaaaggccccagctccaaatatcctcatattgggggttagggcttcaacatacaaattttatggggacacattcagtccatacagatacaccctggccgacccacacatttgaacataatgacacatcgcaccaatgtctcatgtcatagaagagatgcagtgatgatggacagtcatagaaactctgattgctaaacaatttaactctatcttccttcagtttagcacttgctggtgagcccagaggaagcacagagaaatgaaagtgcctctcaggaagctcccattgtagggagagccgtggatgcacccccgagaggatgatgaagtagtagacgcgtggccggcttggaaggagcagcttctgttgatggccagcccctggtgacagggacgggcacgtactgcagttgctccacagctagcaagtcagcgggctggcagagagaacgcgtctagcagatacctgctggaaatacctgcaaggaaatatgaagtggttaaatttttgtggttttgagtatctcaaagattaagtttcaagaaaatgctgggctcatttttttaaggtaaaaatcaggcacatgtcgccaatatatggttttgaaagctttgaagaagaaaattggcggccctgggctttttagctttctcttgagctagagctgagagacagccacacacgggaatcgggcatctcatcgcacgtctgtgcagagccggctcagacttcccagcctgatgagccacagcacctttcttagggaggaatcttcatctccaaggattagtattaatttaggagaatcaatcaaaattttaaaaactctacagcgaacatggtgttttggactcattccactaaatcagaaatagcagttggaatttcactttcagaagcatcatttcttaattaagacaaggccatggaaagttttatccagagaatcatcagaggaaggggtgaaggcacatatgtgcccacttggatggtgctgaggccaggtggccccccaagcacagaggctctcaggcttgaggactgaaggcggtgccgggagggctgagcagcagagggggcctgggccccaccacatgccccacaggcctctccatgccgttaggatataattagatgttttgtaaggccctagcccaggtttgatcttctgcctgacatgactgccattttcttagaaaagcatttttattgctttgattttattgctgagtgtcaggatatcctgcagttacttattaataaatcacctcggagatgtcctggtctgtgcctgggttttctggctctgtgttcccatagatgtcaggctcttgtgtttctgaaccagtagttcagcaaaatggaatcctatggagccaggggtgtccctgcttccagagggattgatcagctctgggatgctccagcgtggacccagtgccctgggaagagaacgaggtttggggctaatgataaaattacaataaagttagaaaagatagaattaacaggcaacagtgcacctaagtgctatgattttgagaatcatccatactgatatattcacctctaatttgatttccatccttaaatatttatttccattgaataaatgtaatttattcattgatgtattgatgggtgtttccagttttcttatttaataaaaacaatgccggcatggacttttgtttgttttaggatggagtctcactgtcacccaggctggagtgcagtggcgtggtcatagctcattgcagtctggaactcctgggttcaagtggttctcccacctcagactcccgagtagctgagacgacaggtgtgcaccaccatgccgggctaattttttatttttttggagagacagggtctcactgtgtggcccaggctggtctcgaactccttggcccgagtgatcctcccacctgggcctcccagagtgctgggattacaggcgtgagccaccacacccggccttggacattcttataatttctctctctgtacatatacgtaagagttgctttaagaccagctgttctcaggcttgagcagtcccacagtcccctggagggctgttcaaacatggattcctgggcccactgcaggtgtgaggtggggcctgaggatttgcattataaccaagttaccaggtgatgctgaggggaccacactttggaaaccatttctttagggtatataactaggagaggaattactggtcacaatgacatggctgtctttcatttcactagatgctgtcaaatttcttgccaaaacatttgcaccagtttatagtctcctcagccacatatgcacattctgattacatcttcgccggcacttggtagcatcagatttttaaatttttgctaatctgttggaatgaaacgacacctttggcagtttctgtatattcaggaatcttcaagcctctcttttcggctccattcttctgccgcccgtccctgagccaaaaccatactgtagtctacttagtcatcaagtgttggttctcagctggggacacttttgcccccaaggggacatttggcaatgtctggagacccattttggttgtcgtgcctggggtggtaagggtgtgctattggcatctagtgggcagaggccagggatgcagttaaacaccccacactacccaggacaccccacaaccaagaacgatctggcacaaagtgtcaggagtgctggagctgagaaaatgttttctagtgaagcttgagtctgctggagccattcctgacctgctctgcacatctgtgtgcatttattttcttcatagttgccatgactcttcttggggtcttgtccgttggtataantgttacagtttcaagtttgttgacgaaccttgtctacagtttgagcggaattgcagtaagtttctgcacggagacacactggacctcttagtggtattggatctttctgcaagtgcacgtgtctcatgcattcctgagtgttgagtagaacttgcctccaatgctgttaccagtgactactctatttgaagagttacctattctttttttctgatagttatagagatttactatttctcgttaattttggcaagttttccatggaattgtctttagttgtcagatatgtcagcataacgttgtccatggtgtgcgtctcccccttagctgtgttcctggttaggcttgcttttgcatgtttaaaattgttcatgtgccttttattcctttcatctctatttacgatgagtcttacccagaacataaccatttttaagcttttttcccctaaagaaccagcttctttgttctttctactgtttcattaacttctcttcagtgtcgctttctttgggctattgtttttttctaacccaagttgaatattcaggcttgattttcagcgttcctctctagtaaggcattcaaagctatggatttcttgcaggggtaccattttagctgaatcctacaaattttgacattcataatttctgggtaaattttatcattagcatttcatatttgatttgtgaactgtttataaatgttttttaaaaataattagatgtgtgaaagttttcctagcagttaccaatttctaactaaatttcattgtgattggagaatgggatttcgatttctcttactaactttgggactgctgatgtcagtcatcaaataggtatagtgacatgcccccaagattatggatattatgttttcattgtcattctgccatatttttactttaaaaacgtaaccaaaaatagaagttttagattatcttcctggtgaattgaaccatttaaaagtcattaagtactactctttatcccaatattacttttgtttcccattaaaatctattttgatattaatacagctgtatcagctttcttcttaattatttgtttcctcattatatcttttcattttttaagaaacatttgcatgtttctgtgtctccatatttgtctcctgtaaacagaaggtagctagattttattttagtttagttgtataatctcttaactgacaagtttggctcattgacatttcctgtgatcactgacacacccattaccatcttatttgttgctacagaattttcctgaaagcttttcttatgcttcttagtccagttttttctctcctgcccttttcaagaagatggcacagacaaactttcaaaactgaagtcagaagccacgatctaaaagacaggccttggcgaaaggcttccgtaggtcagaaaggaaaccctcagaagcgtgcccccaaaaagaacaagcctgaccagcgtgccttcaaattcccctgaccactcagccttgaagatccagcccagcgaactgctgtccctgtgcggctgggctcaacccccggccaagtccgaggcagagcaggctggctcagttggcgagggtgatgccgccaagcatgggatcatctaaaccataatacttttccccaactaaaaataggaattactcttacctctcattcaagtgctgaactttagtgattttctgagcctgaggataatgagactcactttcctcccagatgaagccgcaatctcacgtcgctgtggctctaagcaccctcctctccacccccgtgtctttgttcaggagggtaatttggccttggtgactcctcgttatgactgttccattccaggttttacattaactcacacactcacacgtctctttgcttaacatgctttcttgcactcagcccttccttcactatgcctctagcgagagcaggctcataatgacntgtttcttcttggtctctgcttttctcctggatcttaaacgatacctaatgttacaccattttagagatgacatttctctctcctctttgaacttactccgcagtcttctggcttttattattgttgttcatgagttgcctgtcatcctaattatttccttctctttcttagcctgccctctctctctggctgccttttagagagcctttgtcttttgatgttcttcaacttcaaagcaattggtgtaggtgaagattgctttgatcttgcttggaatgttttgctttttaaatctgggtcctgaggtctttcatcgatttgggaaactcatcagcttctttgaatagagttatctccccttcttggcttcggggaaatgtgaccagatgctacgcttctgcatctttcgtaccttttatgctctcttgtatttcctttctttgttcttctatgctgcattatggcagatttactcatcctgccttctagtttattaattttctattgggctgtgactgtgccccgagtttgagatttcagtctcttctacctngtcattatttggctttcaaatgtctgtccttatttttgacaccttgtttttgacttcacctttcctgtgactgtggtgtatgaacagccatctcatattcttcagcgaggatgatgtttgtttctgctgcccttcactcggagtggctcatttcatgtgtgttacaaatgccagattgggttgggattgactttgtttaaaccaaggttaagggagagtccttccagaaataatttgcatttgcttctgccaggcattccccatggctaggataacttacgtggcttgtggttttctggaccatagaggtcgtttgcctatgagtaaagacctgtggggcatcccgtgctcagtgcccgggcagaggccaactaggcatgtgctgtttcatggggtcgccgtctgctggtgggctgggttttgttttctcctagtctgtgcttccactgcagggagctcttacagcttacagatgtaggtcaaaccccttctgccgttaggcccgagaaatgttccaaggccagtggaaactccacttgcaattagaggagtgcgcctgccgggaaggttcagggcacctgtaggcaggaagcagagctgtggctggcagggaggaaggtcgctaactgttgctgcaggaatgttggcctctttgagacaggctgagcgtcctactcaaaacagccgggactcacttaatgcaganattagtcttcagcgtcccaaagggctggggatgaacagattaaggaagtgtaaaaggtaataatagttgccaagggtgatttaggatgcatttaaagtgccagactggcatatgtcatctactaatacgttgcttcaaattccattttgaaggaagcttaggaaatgcaatgtagttagcctaatgccaatggaagttcaccttttaaagtaatattaaagacagcgtgtcctttctcgtgttgatctatccgcagagcccataggcagcatgtcatccatggaagtgaacgtggacatgctggagcagatggacctgatggacatatcggaccaggaggccctggacgtcttcctgaactctggaggagaagagaacactgtgctgtcccccgccttaggtagggttgacaaacttgcattagctgaaccagggcagtatcgatgccactcccctccaaaggtgagacgtgagaaccatctgccagtcacttacncataaacccccaagctcacagccagctcctggctccctaaccccacggttccacacggctgtgtggcagctgcaacagtggtgtggttccgtcatgaattcttctcaaagatttgacatgctccactccggtaactttggtgagttgagagctttcttgtttgttttccctcctttaccacccagaaatccatttgagtctgctccttgtggttaaggactggcgtttgcagggaggtgcggactctcctgcggggctcacgggaaactcttccctcttcgtgcgacaggcatttaggggcgtgcctgccatgggcaaagccatggtgtgtgttcagctcttggcctgtgttgtaaacttagttgcacttcagttcctttcatcccttcacaaaattttgtttcacattcatgcagcaaatatgggctgaggtgccagacctgtacctgggcttggtgcgtttcaaatttcagaccagttctttgggctgggtcaaggcaaagctcagtcgtcccagcagcacctcagccatctgtagaaggttctaccattaccacggtttcagcttcctctaaacttctcacccgcttctcctggcaatctgtcagaacggtgtcatcctggggaagagaaggagcttgggtgcatttgccctcatcctgagaaggccagaatactggagaccagcgtgaaccctcacccagagtcaggggaagatttagaaacagtgacacctgcatatagaattttgattccttgaagagcctatttagttccataaaattggagaactgctgaaggtcagtaattccgactttctcagcagtggtgtctctgaattactgcaaagggtaaaaaaaaaaaaaagaaatctagattatcaaggttacaaggactgctcctcaaagataggcagcacttgcctttgggcctctattacacgcgtattacagccttaggagcacttgatctgtgtcacatgtggctgactccttaggggacagaagggtcaccgcagggcctgaggctgcctctggcatcgctcagctcagtgtcttccagggcagttcccaagttctgcaggccccaggtgcctggaacaaaaaccacacccccctttcatgacgggcacattccacagctgttggcggcaattctgattcacaatatttttatgacagggctttttcttccctacgttattttgcagggnctgaatccagtacctgtcagaatgagattaccctccaggttccaaatccctcagaattaagagccaagccaccttcttcttcctccacctgcaccgactcggccacccgggacatcagtgagggtggggagtcccccgttgttcagtccgatgaggaggaagttcaggtggacactgccctggccacatcacacactgacagagaggccactccggatggtggtgaggacagcgactcttaaattgggacatgggcgttgtctggccacactggaatccagttttggctgtatgcggaattccacctggaaagccaggttgttttatagaggttcttgatttttacataattgccaataatgtgtgagaaacttaaagaacagctaacaataaagtgtgaggacggtaaactgagagcgcacagagctagtttgtacacaaaggcttctaaatacacatgtccttaaggccactgtaactcagggttccttagagtgaagggacgtgcaggtcattgagggccaccccgggaggttgcatgtgggcagggcctgggccaggtggtggaggctccacagggctgagttctgcatgaggcagggaatgacctaccgtttcacaagtggaaaatgccacttcctgtagaagagctgactgtagccaaaccactctggcaaagcttggggttttccgttgatcattacagaagtaagtaagtatcattagtccagtagccagccagtccaacccctactttttcacactcctgggcccaaaagaacagaaacaagccca

SEQ ID NO: 8 - DNA, 110200 bp, Homo sapiens
  modified_base (632)..(632): n is g or a
  modified_base (3472)..(3472): n is c or g
  modified_base (3745)..(3745): n is t or c
  modified_base (10975)..(10975): n is a or g
  modified_base (15371)..(15371): n is t or c
  modified_base (26644)..(26644): n is g or c
  modified_base (27987)..(27987): n is c or t
  modified_base (58104)..(58104): n is c or t
  modified_base (65440)..(65440): n is a or g
  modified_base (71334)..(71334): n is c or g
  modified_base (88634)..(88634): n is c or t
  modified_base (89236)..(89236): n is t or c
  modified_base (109805)..(109805): n is g or a
ctgggaactgcagttagggcattttgtttaatcagtgctccataatctcttactctcccagtctccctgaaccttctgagagagatgatacctcctgttctgggtaccacatgccactgtttcccagcaagcacaccactcaggcatcattgcaggaactgctaattttaagtaggactttgtttccccaccttgcaaatgggaccctaaatcccaagggagagaaataactaagagaaggcatgtttacgctgggtcaaatcattttgccctcgttcttgttttgtcagcttgcagttctgtgccacaaggcagctgcaggggtgccgtgtgcccttgagacatgggtctgctcacagaaccctcaagctgctcagtgcttcttaacaatgagtaatacttccagggttttatatttgtgaattttctaaagtcaagtataattttgggattagacacttgttctagacattcatggcatagtggagggagcactggacatagaggcaggctacatccctctaggcacctgggccaccctgaaagcctctctgtgtctcctgtctcaattgctgtgggcccacaatgaatgagttacatgaaaaagttctaaaatgttgtgcacttctacngttctaccgtgtatcaggtaactgtacactgtcagagagactcgcgcaggaatcaaaactgtgcatacacatccatctcctctctttcgctgtgtgcatataagggtctgagtgtgtttatgtgtaaatatgaaagggaaaggctagcagagtataaactaaaatgttaactgccgttattataagaaacaggattattatttaaactatgatttaaatttccacctgtatactttactggatcttccaaatgttacacaatctggaatcatcactagtattatcaggaaaagtagaacttatttagaagtaatattcagctcatctgttttcagagtataaatacccatgttgaaacacatgcaaaaatcagatgccttggtcgttaatatccactggagaaatgggcacagagagcttgcagtagtgcctgtggatcttgcaacagtacattgtggaacagtgctttttccaaataccattctgtctctgctcatgctggtaattctatcgtttccattggaagacaatgcaagctgcccttcccagaagaggcaggaagagaagtgaattagagagaggaaggagagaattgtgtgttgtgaaaaaaacagaaaaccaaggaagaacaagatggctatccaatgctcctggaggggagtcctcccccacgtgaggacagggcaagtgcccagattccacttatgtcatcttgtctgcaaaacaaaaccttttgcaacagcctgaatgcagtttggacctttctctgtatcttcagtgccgtatacaaagagacagataatcaaataaggatattgcttcccattggtaggatgtgcatttggtgtgacccaggaactgttctggaacattatcaagaggttatgaccatatgccaagttgaaaatgtctgttttcatcattcagagggactgtgaccacatagaacattccattatgccaggcttccctcctctgttcaatccaactgcactccacgtatgagtgaaactcattgaaaaatcttgtgaatataagtttcacatcagtaaaatttcctctcttgcacccttaagaatggaattatgcttgtcaccaacatttggaagaatatttggtcagttcatatttttgcccttttttgctttagagattgaagtagaggatttgatgaaatgttaaggtttatgacaatttgtataaatgaaaaacctggaatgtatttcttcttggccctgagcaagcagtgaccctaaaggcatttgggaagccagaaatggagtgcactggtagggtgatttatttagaaaataggaatcttggaaataaatcactaaagtaagtgtttcagtgatggatggtcacatcttattctgaatttagaaaatgagaactacccaattcactcctttgtgttcaaaggtagcccctcagagcctccctgtggctggctgaacccagctccgctttgcaggtgcagacgggactgcgaggtcctctccagcctaaggacctcctgaagcgctgggagaacctgcttggtggctgctttctaatgccctgttcatctgaataactaggaggaagtctgagcttacaatcagtgtctgtgttgtttttcaaaatctgggctccctcgtatcctaggcaaccatttagaggagagagaatgcaaagtgggaggcgtcctgtgtgtttaagtcacaacccctggtccctgggtagtagctgtgttgatattgtcattttgaccctttggggccaaagctgctaggagccagtggtgtttggtggcattgtgttgcatgtagaggccaaggagggggcatttctacccttttgccaccctacccccttctcctctcttccctctgagtccagtcgcctcggacagcgctgattcgaggtgaggctagaggaaggcctgtgctaattgcacactagctgacatacctgccccacacctgctttgttgcttttgctggtaaatgcagcaacgacacagcaaacctgagtgctcccattagggaagctggtgcacctgtcctgatagagctctccagcttgacggatgtctgcctttcagtaccgtgtccatagatgtgattgcttttcctgactggggcagtctgcacactgtgggaaggccagcgcaggtgcagcaaaagcacctggcggctctctctggctgtagtacggtgaggctggggttttctccctcagcgataaagcaatatcaactggagatatgctgaagacctattttctagaggtgtcaaaattgtaatgtttgcagacagatatggatatttactctgaatttgggttgttaaggtattaccttcttaaagtgtatcttaagcttgaagattgtattcaagcgtactaagatggcttttctggtgagcagttattacttgattagttgattactttcctctttcacagttgtggggataagaaaaaacagtctccacagctcctctcaggctggaagatagatcaggtcatttcctactaaatcaggacggtatttaagccataagcaaagccgcacaaagagctcacctgattggttagctattgcagttcctacagccttgattttctcatcccgcccttaaaagtaagagcctttcgaagtaccccacctccaatcatgctttcgtaatgacagcttccttctgctcctgaaggtcctgaaggctgccagctctccttgtgagtcttctcatggtctgaaaactcaagcctgcaaggaaatacattatttattttttcatattacgaatggaatttctctctgtgtccccagtccactcggtaacattgtgaggtanatcaactttgtcttcagcatcctacctccttctccatggacacccttctttttcttcattccttcatttccttttcttcattccttcatttcctttttccttcattcctaaccacccaggtattcatcttagtccaagattctagaggacactcaaaatagcttcagataccacctctctcaggacatttcatctcacttcatatcagcctgtaggattcattttattagggtatgctaattgttgtgacagatagactccagagggtacaangactcaaatgacaccagtccatttcttgcacaagtgacttactgcggaaggaacaggtcgggggcagtgcgtctccaagctggcctgagggagaaggctgacaaggactttgccttcctcagcccctggctcccaaggtgccccaggattgtttccataccacccaccatgaggaggaaggggggtttgccagaggcactgtgggccaggctcagaagtgccacgcttctctctgcctgtggactcactcaactgcaagacagcccagaaagttaattcccaggagaaattgttccctgtggagtggaaaatgtggaattctgggatatggctggccatccctgccacagcccactgctctggccagcagatagtcagactgaccctattttccaaatgtaggccaaatacatttactaccaaactagcaacaaacaaacaaacaaacaaaaacaagttcctgtccagtgctgcatccagcccagggtcccggatacctgagcagtctgttgagtgtggggtgacttgatgtgtccagggattgaggactcccagcacacccatccaaagcatgatagggaagcagaggcagaatcctctctagaaactccctcctggaaagggaatagaggagttcacacagccttcaggaatggagcctcatgagatcctgcctggcagatgtcctgcagcatgtctgcctggaagaggaggggacccctggtgctggctgtacttctgcaaggtctttcttgtccatggtcctccaggacctccagtgaggtgtgtcagcagcatgcctcaggggtgccaccccatgtgccatttgcttctgcttcatagtggctgtgtccaaggcagatgaaacaagaagcttggcttagagatgacatcttcacctggtcattaatgaagtgctgccaccagctgtgactgggaattctcaacaggcttttgtagcttaaagtcctttataattctgcctgctatcatatagctccagatgcacattcctggattcccttttcttctactgtttatttctgcttttgcacaaatccatgtttgactgagctcaccttgtgaactagttagctattgctatttaataatgtctccacaagctcagtggctaagataacacacatggattagctcacatattccaagggacaagagtccaagcttgacttggctgggccttctgcaaggtggagattggggtgtcggccctggctgggtttccatctgaaggctcaactgaggaaggatcactgccaagccctcgtggtggttgttcacatggatttcctcacatcaacagatggccttggtttctgtattagtttgttttcatgctgcttataaagactgggcaatttacaaaagaaagaggtttaattggacttacagttccacgtggctggggaagcctcacaatcatggtggaaggcagggaggagcaagtcccatcttacatggatggcagcaggcaaagagagaatgaggaagacagaaaagggagaaccctaataagaccatcagatctcttgagacttaatttactaccaggagaacagtattgaggaaaccgcccccatggttcaattatctgccactgggtccctcccacaacacaggggaattatgggagtacaattcatgatgagatttgggtgaggacacagagccaaaccatatcagtttcttactgagtgttgaccagagactaccacgtggccttttctgacaaggctgtgtttcgtcagagccccaagagagagagtgttccagcaaggtggatatcacagtcataatcacaggagtgacatgtgaccgcttccttctgtgctgctggctagaagcatgtctcacacgctgcccacgctcagtgcaagggacaagagtccaagcttggcttggctgggccctgtgcaagccaagcttggactcttgtcccttcctcggaggatgggactgcccaaggctggagtaccaggaggtggctctaatttcagcccatcctggaacctttatcaagaacctactctgtgtgaatatattccatagcatttacttttttttttttttacaagattgaagcaactattattatccttacctcgcaaataataaaattgaagttgagatcccttagtgtctgacactaactggtggagcaggtgttcaaatgtaggatttagtgtaacacatcaggagtgtgtgtgtaggcagtgaatggatggcacaggtggaaagcgaatcgaaggaagtgaagctgaaaagaaatgttggggttggtttttaaagagttggacattacatggaggctttattccaaagttcctggaggagccactgtgtttgaatgatgagaacatgtactcatcttcatcagttttaagtaatagttgtggtcagacttaacagcctacattcaaaggtgaggttgaaggacatttttattgatactaatatatgaataaaacccaatcaacttcaagtaaaatgtgaacacgattttcaaaaacaattttttagaatttcacttagatattggtgatttttttctcatttgtttagagtaatataactgactattaataattcttaagatgaggtgaaaattatttaactgaaaggcttccctcttttattgagcaaaacatctcatggtatttagtggaataggtttatgctaattttaagacatattgaagctttttaaacaaagacattttatttgcaaatgattacgtgtggaggctttacactggttgagctatgctatggtttcttgagaagggaaatggaatcttggtttattttggcatcctagcatcagggatggtgcctaccacattgcaggagctcagtgctggactatgcaatgaataagttataaaatttatcctcaatctagtgcaaaaatgaaggcaaaccctagagctgaaggctttgtacattcggcagagaactctttccatattgtttatataagaaattcattctgccctctgaataattcatgggacctgagtcaaacaatccaaaacccagaaagcaagctagaggagatgttcaaagtcatatcatttagaccattaaaagaaatccgtgtcataaggcaatatgagctttgcacttcagaggatgtataagtcattttgttgaggaagaggtggattttctatggaggtatcaggatggctccctggtgggggtgagacttgtgcttgaaggacaagtcctctgtcagatcatgaggagtgtgaaggattccagtccaggggaacccagtgtaaaggtcctgatttaaggaactgtcatccagatgctatgtgtctgttctaccatgtgctggtcctttccacagtgcgagtcacggaacggaagtgctgctagtgtttgcgcagcatgtgagtttctctgtgtccccgcgctgagggttgcagagtcatttggggggcttcctcacagtcttgagcttgcaggtgtttggtcctgagtgttcatcttgtagactgctgcattcttttctgccatcagtggtttcagcaagagccctggcaccaagaactttgttttcattggttgacagaatggcagaacttgacaggtctagaccttctccccagtcctttggcaggtggaaagtgatgtcccccaaaacatccatgccaaatccctggaagctgcagcagctgacatgtttataaaagagcctttgctgatgacattgagccaactgtctttttttttttttttttttttttgagatggagtctcactctgttgcccaggctggagtgcaatggcatgatctcggctcactgcaacctccacctcctgggttcaagcgattctcctgcctcagcctcctgagcagctgggactataggcgtgcagcaccacgcccatctaatttttttgtatttttagtagagatggggtttcaccatgttgaccaggatgttctcgatctcctgacctcatgatccacccacctcagcctcccaaagtgttgggattgcaggcatgagccaccgtgcccggtgagccacctgtctcaagatcatcctggacttcctgggtgggccctaatccaatgctgagtgttcttaggagggaggcagagagaggtggacagaagagaagataaggcagggcatggagtgacactgccacaagtcagcagacactagaggccatcagaagccggaagaatggggaatgattctgccccagagctcaggagggagcatggccctaccagcactttgatttaggatctctggtgtccagagctgtgagagaaaaacattttgttgcttttaccaaccacgtttgtggtattttgccatggcagccacaggaagctaatgtatcttccttatgaaaagtgaagacattggtttctgagcattcaggtgacctgctccaacccgaggctgccctctgatgatccccaatagcctttgagtttggattctgtaacgctgctgaagtttcatgcttgacctatctgtcttcctctgcaattttcctgaacagaccacacagtgaggccaaaccatgggcagtcttagcatgacagtggctgggtgttcgtggaggagagagtttctagggagcaccctgcatgcccagcctctctgggtatcactgtgttgcagcgcgtttgtggttatgtttcattagcagagcggttccaaccgtgcttgcctgtctctgtttcatacaggctttcttcagatgacaattaggattaccaggtccccatgcacccagggtttgtggagccacacaccggcttgttaggatccttccagccagctgcattttccagagcagctggactcttactctctcatttttttttctgttctgttctattctggggtgcattatctttagaaatgccaagacaaatggaaactaatttgcaaatgccccttatggcttaattgattgctttctgtgctgaccttcgtgggtaaaaggcagccagcaggaaaaggaacatcttccccagaccccgtgtgagccttcttccccatcactctgtcgatttccagaatgttttgagaaaattgggtaaagatggaagcaaccattttctgagatggcaagtgatttgccaggttttgtaatgctcccctgatctctctcctcttattcagctgcagattactctggaaatgaaaggaaggactttttttctctcttgtcctaaacagtatttaaggctgagtcctatgaggaccaaaaagttagcactaagattgggccactgtggagggcagttctcagcatcatcacagcccagcaaatatcaggggagctattgtgcaccccagccattcctcagcctccccgccgggggtttgggggaggtggcttcaggttctgaaatatgtgccatgtttctgtttctctggcgccctctgtgatgctggctggacacacagacggggctttccttgtgtgatgatcagtgttatatgtcagcttcactgggggccatggagtgccggatagttggtcaaatattattctggatgtgtttgtgagggtgtttttatatgagattaacaattgagtcagtagactaggcttccccaatgtgagtgggcctcatttgatctgttgaagggccggatagaaaaatgaaaggctgacctcctctaaatgacactgtcagtcagtcagtcaggtgccagatttataattgtgtgagccagttccttccaataaatctctctttctcgacatccttttggttccgtttctttgggggaccctaatataccttgttttgctttattatttggggttttgatcacttacttctaactttgaaaaaccaagtttttagctcttctatatgctatggaaaaatttctttttatgaaaggaaaaacatgccttaaccacagcatatcaggaaatctgtagatgtcagatgaaactgcagtagagaaatggaaacatatgccaggcaaagggtaccgaggctatgataggagaagcacatctctgtagatgtaacaccagctgtcactggtcaccgcccaggggctcctcgtctttaaagaggggataataagagtgtcttcttgattcctttgttttcaggatgaaaggagaccatgcttgaagtgtctttcgcatgaggaccatattaagggctcagtaaacattggctggccagtaaagtggtcagtgttgggttggatgctgtccccctgcaatgcatatccttcctggaacctcagaatatgaccttatttggaaatagggtcattgcagatgtacttacttaagatgaggtcacacaggactagtagggtggggccttaatccattgtaactcctcttataagaagagaagagacagagaaaaacacccagtggggtagaaggactcatgtccatgggggcagagactggagtgatgcatctgtgggccaagaagtgcaaggattgctggcaacaccagaagctgacagaaggcatagaaccgtttcccccagaccctgcagagagagcatggcccagctgatgacttgttttggactgtaggcatggtcgggtgtgagcaaggcagcagcacctcaggagacatgtccagtgctcagggaggcttcatgaaaatccctaatcaaagagccaggagttgctaaaggagcctgcatatgtaaagagtagagaagcaacaagatagtgccaaaaaaaaggcaaataattttgtttttatacaatattgaggaacttttggaagtcagaatacttttaaaaattaagtataataggatttaaaggacaacaggagcagggaggcacatgtgtttgcagaacagataatcactgtgattttcatacagaagccacaaatagagtgaatttagaagatgccgtgtggagtgtgtgtgttgggagtgggtgagatttcactgcaggattgatgtaagtcttggcgagggctaacaatctatcaagcagcttggataaaagggacaaatggaagtggagccgtttcaagaacccctgaaggagtctggcaggaagcttgatggttctcaccagtgagacccagcctcgggccttctattcatggacagaattaaaaaaataataacattgccatcactttgctataaagcaaggtaaattgaacatacagtctccaacactgtcccaaaacagctctgaaaactggatcatgcnagcctcagacatagcatcattaagacctctaatggctaaggatgagttagtggagaattaaataaaaatcagcccgcactttctcaggtttgcttttcttttgattgtcttcctggaagaaaggtatcctcccaacatcactcccagctcactcagtatgcagaggtggagcttttgagggctggctcaggctaagcatcatctctagggatcaggggaaatgccagctgatctgccaatatctccaagaagccaagtccatttggaagagagtcatcttcctagagtagatgcgtcctctctaaggttgcctcaaggctccccaaaccatttctgtagcaaggggccatcttgctacagaaatagtctagaaagtcaggcatggtggcatgcacctgtagtcccagctactgggaaactgaggcaggaggaccacttgaacccaagagttcaaggccagcctgaacaacatagcgagaacctctctctaataagtaaataaataaataaataaaaattagctgaatatggtggtgtgtgcctgtaatcccaactacttgggagactgaggtggcaggatcacttaagcccaggaattcaagtctgcagtgagccactccagcctgggtgacagaacaagacttcatctctaaaaaaccaaaaaccagaaaacaaaacatgatttatagtcattctgattaagctgggcatgatggcttgcacatgtattccgagctattcaggaggccagggtggaaggatcacttgaggctgggagtttgagaccagcctgggcaacacagcgagaccttgtctctaaaaataaaatgaaatgaaattaaaaagttttaaaaaagaaatgtccaggaacacacactggagaatgagtgataagacaccgtaagagattgcttataagcagtggccacagttatggccctctgtccacattcttctacagtgtgagtttccaatctctcccatccagaggcaagtctctttctggccctgggacttgcttccaacaagaggagctggtgctagttagccctcaccaagcctgggaggcaaaaggccttgtggttcccagtgacttgcttggaacccttctaaccaccatagaaaccaggcaagctagcctgctggtgggggtggtggtggggagggggacagagacctctcggagaagaggcaggccaccccactcaggtcctcttaggtgaaatggtccctaacgggtggctgagggcacacagctgagtgagttgagcccactttggctaagcctggcccacatcagcaggaccacaagttgacctggagactcctgagcagtaataaatggctgttgctttaagccagtgagtgttggttatagtaaaagctaacaggtatagatgctgccccccacaaacaggtggcttgcaaattagaaagctggggcccagaggctacaaggatgctagatacatactgatagaactaggatcttttaattctcatgttttgctgagtgcttctcctactagattagactgctttgggttgggaaactgatgaattataatacatattctggtagaattagtagtttccttaactattgtacttttattaaatattcatttgaaatttattaaatattaataaattattgaatattattaaatattcactcatttattcttgaatagaaatacattcattgattgaaaaatatgttcattgtttgaggagttcttggccacacagctatgtcttatcaatgtgtgggtgcagcagaggaggctggccccaaatggatgtcacagcacgcagtatggatcactgacttactccatgggccaggagggaagggagctggagtaaacactgagtggcaggcaggaccgagtcccctcccatgccactatgataccaacaacatgggcttcccagaaccagcggctgagagcctgtgactgaatccagctgctgtggtcgaccccgctccccaggagacatactgcagatgctcatgcttttcccgtatgggtatgacatcgattttcaatagaaaggaggctcttggagctatatttcctggtgtggtagatccctccagtggctgttaacaggttacatttcactgaattgagttctaatcttcagtgagagttctcttggggacccagagagtgcttaagttagagtgtttatctgaacacatcctggtgaatgtttagtagtgaagcaaggcacacagtcacatcacattacaaataaaatgcctcactgtcatcatgagaagctctgtggtcaagattcccttgcctgcttctggtggaggtaggttcagacatggccctgaccctgtggctgtgtcctccctgagatgacggagagagtcctgtatgctgattcacagggtcaacaagtgtcaggcacaaaaacactgtggaaaaataagtcacagtgcatttgacctctgacctgaaaagccacccaatttcacatgaagcctctttcctgcttttcatgaaaggaaatgaagttgcaggtataattgtagaagaaagattccagaatgccacaaatgcataaccttgcatttatgcggggaacgcacgagcttgtatgacattcatcagcattcatagctgaattttaaacataataagacaaaaaaaattctgcaggcaatgtttcagatcagaaatgttatgagaggaatcatgacaaggggtgccctgcattaaatggaacctgattagaagccacttgggcaagggttgggtctgcgtcccacccccacaactgaagaaggatgttgtggagtattcaagatcacgataaaaccacagagtcattccgtagttgcagaacgtgattgatgtggaaaggataaagaaagcaaactcatttagtttatgaacagtaggataagaaatgactgccaggaaccacagatgccttttaaagtccgctgcaatgaaagccgcagtagaccctggcttggtgaatgaagaccagccaggacagcagcaggaatgttgatgcttgctagagctctgttccctgagggacctgctcccgcttctctgtcactcatgccttctctgctgcaagaggtgagcctccccgaactccctgcatcttggcttctactacagaattctcaggactacaagttttctccgttaaccatttatcttgtgctttataaaggctgtctgtgtgtctgtgtagtgcagcttgtttcatcattatattttatcacataaggtaaagatcaaaccagcctaaactatataaaatacattttcatgtttttagtgataacttacaagctctaggcttgttagcataacacaaatgaggcagggaaaaatagaggcagtttttatgactcaaatgatacttgcagacaagcattaacaaatgctgtagtaacaaaggctaagatcatttttttcctgactttcattcagaaaggaagtggcatcaaaattttagtcatctgaaccgacaagtggtaaaatttggattcttgaaaagtaagagctattgattttttttttttttttgagttctgtcaccaaggctggcgtgtagtggtgcaatctctgttcactgcaacctccgccacccggattcaagcgattctcctgcctcagcctcctgagtagctgggattacaggcacacaccatcatgcctggctaatttttatgtttttagtagagatttcaccatgttggccaggatggtctcgatctcctgacctcatgatccacctgcctcggcctcccaaagtgctgggattacaggcatgaaccaccgtgcccagccaacttttctattttcaattaattcccatgacttccaagtgcctgcagttatatgcaatggccaaaaaaccatggcctcatgaaggatgttgaaatctacatatggatcattctttccaaacagtgtcacaaagccccaggtaccatctgcagtatgtgttcaccatgtatgtggggcatgggtgtttcaaatacccgttagcagtgtttaaataggtaattgtttcccacacttctctttctttatatttcttcaataagcctccgtgttgacatgctgtgaaggtaagctgccaacctttccctgtctacatgatcacagtccacctatgacttgtcaccacatcatccacagcaaaagtgtgtgcagggaagcctggtttggtgtctgggctggaggcacagtggagagactcagcctcaggcctcaccccacctgagaaccctgggtcccagtaggcaaacgtttcatctcatccaggccgtcttgcctcaaccactttgctcacgctccatcctccagctgaactgctcagataaactgatggaatgttgattctttcagtncagactcaaataccatcttgtccttgagccttttgggattatcccacgtgcctctgaaatcctgcggttctgtgtctctcttagacctttggttacagcctctttttcatttttgcttctgagttttccaggcacatttcttattttttagaaagacaaaattcttagtgtgtgtgtctctacctggcaaggtgcctccaaatgggaaatggaggttattctgccctgaccctcagccagaatgttgagatatgatggagattgcctcagtctttaacccaaggttcttttgtagtgagacaaataagcaaacactgagaagactggtcctggtggtacaaccatgaatgtgaacctgggcacttcaggctagcctggggctgcatggcacaagagtcagagaaccttctggaaagactgttcagtctttaaccattatagtcagtagttaactaagtatgtctgttttcgtcatggggaccaaataattagcaaattgggtactgtgtaggaaaaccgtcctcagccacatggaacagactctacgctagttttacctggattcagcaactgaccactgacctccatcactgcagaagccaggaggccagggtctccaggggggtgccactctctctgaagagctgcttcctgggctcttcagagccccctgcaaacagatgggatcaacataaaacgtggctctccttctgacactgtgtcttcttaattctctgtgtgagcaccagccctaggggccacttccacaggccctgggacatgtacagtagttgaagggcctctgatcttagcaattcatagaagtgacttttggcagtattcgtcaagaagcacttcaggcttattcgatactcagcaggtgcatgtttgaatgagagtatcatgcaccacataagagggcaaataagggtttcatttcaaggctggtgtgaacagtcattctgacacttgtgtgagaaccctggaggaagtgctggagaggaggggagtctgacctcatgggatgtcacatctctaggctgtgatcttgttatttgtaattttttgcatcataacagatcacctttcacagacttaatagatctgcctcattctgattgaggcaaaataacctatagcactggtacaccagctattttttaaccagtgtgctattgatggtgtcttcagcttttctccaaacaaatcagttggaaatatatttacacaggcacccttaaatacttttaggaatatttctctgggatatgtgcctagaaattcaactgctgttttcaaggtctatgcacttatatttgtatagttactgcaaaatttcattttaaaaaatttgaaatatattgtctcaaattactcccatcaacagtgtagaaggttgctgttttccctctgacaatcactgcataacatcaattattctaacttaaaaattgctaatctggtgatcaataacaaacttttttttgtttatgaactatgatagggagagattgaatgaaacaacacaggcctgcattggagggaggtagcaagcttcagttaatttgaaaatatcaaaatgctaattttaaaatacaataaaaattgttcagcttattttttctccctagcatattattttagtatactgaaatccttcctatgttctgcaaatctacaatgatcatctatgctctttggatatatcctgcttttagattcagaatagtgacctgtgtactttatagtaactaacattttaaacatttcattgaagaacttaaaaccaactccaaatttgcattatatatggcagagctcaacgtaagaacttcctgttttatcagcttctaaactttccttggtttttaagattaaatattacatacagtttaacaaaattgaaccttttggagttttggcagtttttttttttttttttcttgtaaaggacatggagtagagggagtaaggggtcagataaatgaatatttgtggatccgacatgccaggcaacaattcataaaatattccctaggagcaggaggaggaagggtcactggtggaagaaagaaccccccttcatctgtgagcagcctgctcctactggggacagagcaggtcagagttctgcgcatttacaaaggcagcatgggttgtgggggaggtgcagttccagatccatgtctgtgtcactcgggcacgtctctgagcttagactgggaagtccaactttatctctgaaaatgagcgctgtagttactaccctgcctcccctgccagaatgtattgaaaatccaaagaataatatgtatgacagcacttttcaaattggaaagtcctatacaatggaaagttgtcaaaactgtaattaatgtcaacatggaaaggaaattgaacaaaaatgaagttattgtattcaaagctttataacatacatttaggttagttccacaagcattttttcaatgggcggtttatttgaattgctgctgcttaggtaaagcatgcaaaaaacattcaggtttgcctggatttgctgatttatttctgtcagattgaaaatgttttgtttgtagcagtttctggtggggagagttttgagttctggaggctctctctgaggtgctgtcctggcttctctgaggcctgctgggtgaagcacttgccttcaggtcgtccttgtgggccactgtgtctgtggttctttccatagctggatgcaggacaagggcagggacagggaaaggaacccctctggggagcccagacttccgtttccagaaagtgtctgcaggccaaagaaaacacgcagtgcccaaatcacatctttgagttcttgcttcatgagccatcacagtaacaggttgcacggggccagcccccgtgcttggctggactgactggagactgagagatgggtgacgtgacctgagaggccccttccagtctgcgtcttcagcagcgagggagtttgagctgatcgaaaccacacttgacatcgagcgaggctgctgctcagtgaggtgcagcgggcatgtctatgccatgccagggcatgggagccttgacctctggggacttggtgccagggcaggggcctgagtggaatcccggcctgcatgcttcacctcggggtccacagttcgtgttcttctgagctctgtaggatgagtggctcactgagcatttattgacagcctacttgtgtcagaccgccttggggtgctggcagcacagtggttcacagaacagtatctgtgcactcacagagctgacacttgaaagtgtgggccaagatgacttttaaaaaggacatgtgaacatgccacatggtgataaagtctttgtggaaaagtaaagcaggaaaaggaagtaaggagggcctgaggtgtgtgcatgtcagggtgaatgtgtgtatgcatgtatgcaaatgtgtgagattgtatgtgctgtgcatgcatctgtgtgtgcatatgtggtgtgctgtggaatgtatgagtgggggtgtgtacatgtatgtgtgtggtatgtacatgtacttgtgtgtctggtgtgctgtagtgtgtggtgtgtgtatatgtaggcacatgtgtgtatgaatgtgatgtgtgtatatgagtgtgattatgtgtggtgtgtgtgcatgtgtatgtgtgtgtaatgtgctgtggggtgtgtgtggtgtgctatggggtgtgtgtgtgcatgtgtgagtgtggtgtgctgtggtgtgtgtgtgatgtgctgtggtgtgtggtgtgtgctgtggagtgtgtgtgtgcatgtgcgtgtctctgtgtgtgatgtgccatggttgtgtgtgtgcatgtgtatatgagtgtgtgatatgctgtggtgtttgtgtgtggtgtgctgcagtgtgtgtgtgagtgtgtgtgatgtgccgtggttgtgtgtgtgtgtgtgtgtgtgcacgcatgtgtgtggagaggcctgaagcagctgagggtgtgagtgggcctggaaaggcagccttgcaggcgggctcacgtttgttagatgggcgccgcggtgcgttctgggagtgctcggggcgggcgcgggggcgggcgcgggggcgggcgcgggccaggagtgggaagtggtggctaaaggtggggtcctcgtcctggcgcctccagggctctggggaagccccaggagaaggaaagggtgcgctattcagagggcaggcgctcgtgggaggcagggctgggagtctgcagccccaggggctttactctggccaactggggaggctgtgtgccgggcaggctgcgggtgaacactgcctgtattagtccagttctcacactgctgtgaagaactatctgagactgggcaacttttgaagaaaagaggtttcattggctcccagttccgcaggcctaacagcctgactgggaggcctcggaaactcacaatcctggtggaaggcgagggggaagcgggcttcttcgtcacgtggccaggagagagcgagcacctgaggaggtaaacaaccagagctcctgagaactcactatggagagcagcatgggggaaaccgtccccaaaatccagtcacctcccaccaggcccctcacaattggaggtgagatttgggtggggacgcagagccaagccatgtgagtgcccgaggaagcggtgctgcactttgcagtagaggactctgaagggagacggggtgagccatgggggagatgcatggggaggatcacagccttggctgggaaggaggggaatggggctgtgccgggtccagggcattgaagcccgatgaacacgggagagcctgggggtgtcaggctggctggcgccgggctctggagccctgagcagggcgtctgagagcagaatgtcggttcttaaggcctgggcaatgaccaggcacatcctctggaagataagagctggggccatagggcaggaaggaccgtggaaggaccagacttgtgggtgcaaagaatggacaggaagcagggccttggggtcaggaggagccgcagggaaggcagaacggtggccaagcattggggaatcagctgcggaatccacagagcgcgacattcccttggattggagaggacagctcgtctgcaggcaactgggaggagcgaggtggacctgctgcctgcagtccccatggtatagacactttgggaggagggtgcaggctgcagtgtcctctgtggggagcacaccagaggcttcttgtccacattctaagtctagtctctagggcaggctggcattagtatggttcagtcacctccccaggtgactctagggtacatccggggtccatagccctggaaccagactcagagttgaaaggcagttcggagacaagcatgtgtttgcacaggactctaccgtgtgtgaccatagtagcagcccctgccaggcctcagggtaggcgggggagagaggctcttggattggagacccccgagcacagggcacagtggcagatcatgcaggaaggctgtggtcatgcgaagggaggacatcttgccaggacggcaaacactcatctgctttctgcctctgtgcatttgttcgttctgaatattgcatgtgaatgaaatcatatgccatgtggcctccctcttgtgactggcttctttcactcagcatcatgttttcaaggttcatccatgctgcaccccgtgtcagtacttcattccttttcatggcttaataatattccactatatggatataccacattgtgtgtgcccattcatctgttgatgggcattttagttgttttcaccttttagccattttaaatagaactgctatgaacatcggtgtacaagtttttgtttgaacacctgttttcagttcttttgtgtatagacaggtagtccctgacttaagattttttgactttacaatggagtgagagcactacacgctcagtagaaaccatacttttgagtacccacataaccatactgtttttcactttcaataaattacatgtgatattcaacactttattataaagtatgttttgtgttagattattttgttgaactataggctaataaagagctctgagcatgtttaaggtaggctagactaagctatgatgtttggtagattagttgtattaaatgcatattttacttaaagtattttcagcatatggtgggttatccgtaggtaaccccattgtaagctgagcagcacctgcgtttaggagtggaattgtgggtcatatgggaattctatgtttaactgattgagaaactgccaaagtgttttctatagcagctgcaccgttttacagttccaccaacaacctatgagggttccaattcctccacatcctctacaacacttattttattttagtttcatggtcatcctagtggctgtgaggaggtatgtgattgtgtttttgatttacattttactaatgaatctaggatgtctttctatttatttgtgttttaaaaaaatgtttcaacatttgataattttcagtatacaagacttgtacttctttggctaaaattatccctaagtatttttgactctattgtaaatgaaatagttttcctacttttgcttattgctagtgtgtttcctcttcaggctttttattgctggcatatgaaattggtgcaactgatttttgttgagttgattttatatcctgcaacactgctgagtttgtctattagctctaactgtgggtgtgttcttatattttatacatataagggtgtatcatatgtaagtaaagatagttttatttcttcctttactatttggatgccttttacttatttttcttgcctaattgctctggcttgaacttccagtaaaatgttgcaaaagagggcatacttgtctcgttcctgttcttaagggagaaagggtgcagtcttgtcattgagcatgatgtcagctgcagatttctcatacattttatcatgttgaggaagttctgcttctagtttattgagttaatttttcatcattaacagatactgtattttgtgagttccttttttggtatcaattgatcattttgtttttctcttcattctgttaatgtgatgtattgcattaactttttgtatactgaatgactgttgcatttctgggataaatcccacttgatcatgatgtataatcccttacatgctactggattcagtttgctagcattgtgttaaagatttttgcatatatattcataggggatattgttctgtcgttttcttttcttgtgatgtctcttcctggctttgtaatgatgacctcatagaaagagttagaagtttcctcctcttctatttttggaggagtttgagaaggactggtgttgattcttctttaaatatttggtaggattcccagaaaagctatctgatcgtgggcttttctttgctggaaagttttgatcactgattcaacctcgctgtttgctctagatctgttcggattttccattttctttgtgagtcacttccctgcatatgtctttccagggaaacccctgtcaggtcaaaaccaacaaacgtggttccttgggtataagatccactctgctctttccagaaatgtccacatgggaaactcggcctgccctattcaagatggctgctgtactgcatcgtggggcagagctacggcaagctaaaatcctgcagtgttctcctgtcctgtttcagtggcaaacattccttggttgttataaccctgtggctatctttcggcatgctggtaaggttgattctgccagtttttgtcaagtttttcagcatttcttaggaggaacaccccagaggtccctgctccaccacttttgctgatgtcacacctgttaaataaacttttcttacgcactcactgttttatgaagcaacagttcttttactgtggagtttaaagagtctcatcattttcctctctcacctggccctctacgggaagcaccctctgatgtcccattcaccccgggcttctgtgtctggatcacaccagccatgtcattctgttatgactcagtttactagtttttgacttcctttctgacagaactggggaatctttaggggggatggtctcccagatttgagtcttataaagaatgcttctttgtgtgtgtgcatttccaaataaatgcaaatgaggcagggcgtgtctttcatgttttctctgttatcctatttttatgtgtccatgttcatctctctgctctcctctcccactgtctgagacctcactatctggtcctgcctgccttggacagctgtttgctgtcaggtagctgctgtgtaaggacccgcagcactcacaggtaatggttgttcctgtgtctgcagcaacaagcggatgctctggaggctctgtgtcgtgttgccccgtccgtgtgagctgccgtgcagcggactgtgcttaatctcgggtgatttagtgctggagaaaataacagtcaggccagccattgaaaaatagatgtgcttatcaaatatgtgtttgctttgtgtgcaagttgaattacagagttttcagaacaggaagggcgggacctttgagatgacttgctcggtgtctttgttttacaaaattaaggaatggaattcacagaagtccatcaaacagcagctctctccctcccagaagagtgtcccccctgcagccccacataattaccagtatctccatccacagggtcttctccttgagttttcactagacttggtctggtagctgagtttgtagattcctgcatggtgcagttgaaagggaattgagaaggggcctccttctgtaatttgttttcctggcacacatccccagtcactgaaccctaccccacggactcctctagacaggcagccattgggttgagagagaggatctcctctagagtgggtgctcactcagagagtgcctgagcattgtatcctgggcacctgaggcttgaagctagtgaggaagggagtgtaaaaatgagaacggaacagaccaatgtcacatgtggccaggttggtgaggtggaggcaggagagctgtgatgaagtggaggggtgcagccaggctgactcaggctctgacacttactgcatgacagtgagcagacccttacatgccctcctcattggttttcccatctgtgcaatgggatgatgatgataatagtcaggagttctgagaagagcgtatgaagcactgaacagtccactggtgctctctgagagtcagctgtcatgacatcgtaagtactgttcgttatgagctgctaagccctgcggctccctgctggagtcggggactctgctgttcatatacacaaggcccagtcctgagtgtgcattctcttgacttctaatgttgatccttctattggacatacagaaagattatgcatggtcgtagctatgatgttttgttaaaagaaaggcccttaaaatttttatttttaaaaattttagaaagatatcaggctagaaaattttggcaacaatatttgggcactcaagatagaaacccaatttccagtatgatggatactctgtaagtcagagagtgacataaagagccctaaaaaaggaacttcagaaggtattgacactattgcacctttttaaatgtcgaggtcccttcagcgtgtaaatgggttcatgccttacttcatgctgggaggcacagagcatagtggctcacagtttggtcagaatacctggtttcaaggccagtgccatgggacaccttctcagccccatgaccattcacataaaaaataaagatgttattagcagtattagtcctcctgccattgttctgacacctgatgttggttttatgcatgcagatcacattgcacagtctttggcacatgggagatgcatatagttacccttagtggttgcgagtatttgctccatacagcccacagacctgaattaagctggctgcttccacgagtcctgtcctgggttctgtgccaaggacccaggtgcttgccttttccattttagagtgaaggccacagcagtcaagccttcagaggctgcaggggtgagcattatttcctcattactcctttggagaccaggggtcagaaagccggagtgcatggcccaaggcatttgaggtgatgagggtttccagatgaggactatcaggctctgcagctttttattgcaccagctgccttcttaaaaaattgtctgcctccatatttgcagtgtacttggtctagaaaacagtgtctcccagtctcagccccagataatagatgatcttgttttaatgtgtttggaatgtggccatacagatgggattgaccttcctggattctaagaaaagcttctgggcctgaggaggcacagattcctggggctcaggaaacataaatagagggaagcagttctgcagggagcagggagagccttcccttgttggaattgggcctgagagcattatgtcacctacatttgcagagatgcctgtctctcagagggtggagagtgtaggacataaattaactcaataaactagaagcagcacttttatgctttgtgcagcataaactcaaaagatttgcttttctgattacaaatagatatttattgttaaaatttaaaaatatagcaaagcacaaagaagaaaaaatcctagatattaccatttaaattttagtatatagttttccaaatatatatattatgacaacaaacatacacacaatttacactgagaatagcattttctagcctgttttatacacaagacacataattatctgtgtctataccatagtttcttttctttacagctgtacctcaaagctctgcctcagtgtttaaccctaatacactctccaccctctgagagacaggcatctctgcaaatgaacaggactggattttcgccacaccgatgtctcccattgtcagttttttaaaaaatgacatttcagtaacaaattccaccaggactttggacttagactgtcttatcaccgtcatgtcagcagcaaacagctcaggcccctgtgtggctggctcttggcaactctgttgaatgaaggcatttatatggttgttttggcaaaagtgcatggattacagaacttcactgtggtataagaattggtaaatgcatatgcagacacacacatgcttctgtgatgataaaagagagttctggaaatcaagacacaccccatatactttcttgcgacaggtgtgggaaacacacgctttctcatcacagtgatttcccttgtgtaggtctcngtctccacatagatgctggcgaatgtgctggaaggtgtggtatctcacagtgaacttcttcctcgtggcgttacacgtggttgtccctcataatttaattatttgtaaagctgtcccacaattttcataaccgagtgtatactcatcactttctagcagagaatgatgccacagcatgggagaggagacaagtatcatctgctccctattctttcactaaacttaggtttttctctttggatgttgtgctccaagcagtgagaggctgggactttagtgtcctcccagtggagcgcaggaggagagacctggtccgggaagcacgtgccttcctcctggctctgcctcttctgacttcctcttccacaccaacccgttttcagacacggatgcctgatcccttctctgcatgcagaaactgagctcctcctggctgcaggatgtcccccaggacccgccttcccttcctgggcacccacaacaactcttccatttccagcggttcagcccaacctggattatcgcatctcatcaacagccaccatatggtcagcctggcaggctgcagatccttgcatttggaaatgctccaattcatcacatacggttcccagcaaagtatagccagtcagctcatactaactcatgacaaattgttctttcacgattcacagtgggcaccgtcacacaaagcagggttctggtttctgcgtgtcttttcttcatgtttgtcatttagtttagcaaatatttattgagcacaactgtgtaggggctccaggctcagcgctgctgaggattctgagtttcatcagaggaagtctctgcccttcaggagcatctagtgcagtaaagggataaaacatgtccacagacatctggtcaaccatatgaatcattgttcctctgttgtattttgcagatcagaaaaaattgtatctttcagcagagagatgattagttaattgctcacctttgtgctcacagcttattcatctttggactttgaagccagggctgctgagctggaatctcaaattgtcttaggacaaggatctctgcacaaggcatgaaattagaaccagcattttccttctcattgtcagtagctctgtgtatacatttcatttttgtatcttctgggagggaccaataactataagatactaacttctgtttgcatatgtttttcaaatctggaaccagtttccaaataattaataaattcatactgggtcagaaaagggaccagttttggatcctgtccaccttctttttgtatttgttgttgtttttctattgctgtatgtgtccaactctacgtgaaagcacttgtgaaccanacaaatgagattcttttcttttctttctatcttttttttttttttttttgggagaatgtgtctcactctgttgcccaggctggagtgcagtggcccaatctcggctcactgcaacctccacctcctaggttcaagcaatactcctgcctcagcctcccaagtagctgggattaaaggaacatgccaccatacccggctatttttttttttttttttgtatttttaatagagacagggtttcaccatgttggccaggctggtctgaaactcctgacctcaggtgatcctcccgctttggcctcccaaagtgctgggattacaggtgtgagccaccgcgcctggccttgaatgcttttctagtgtcagatccttctaccagactttgagctctggtgggcagatacttggagatgctggcccgctgctgggcatgtaagaaatggaaaggcagaggaagctgcccagaaaggctgcagatgttttgaggcaagagtatgggctcctggggaccctgggtacttggggcttagaaagagggccctatttctctgggcttaggaagaaagagtatcttccctgtagacacagctcacctcattcacaacttttcctgaggcatagaaaaattttattcagttatttttaccttctctccttccctccttccctccctcctttacttcctttgtttttctctttctctttttctttcttcttgtctctccttcctttttccaaccactcccaatcatttttgtctttcaggattacagctttaattataatattctctaaattttctgttcaccctgccgcagagacacttaactggtgcgattctgtctcccacctacccagtccccactgagtgactggaggtgttctgctgctgaagcctgggggaggtgtgctactggcagtgagcgggtcaaggccaagcaggccactcaacagcctgaatattcaggaaaggtccctccctaaggaattagctggcccaaaatgtcatactgtcaaggatttgagaagtgctgccctggagaataaggatatctatgataaatgacattatgataatattacaagcctgctgtcattattagctaatttttttcttcttaaatctattattctttttttttttaaatcagatgtcttataagaagagaaggaattaaaagaaaaaaaaaaagaaactgtaacaacaaagtcctgggtaacacacagaaagagttaggcctgaatgatttggagttatcacaattttagtattttaaatttttgttaatatgctctgagaacacaggaagagaagattcagtcttttaaaaaatactgaatgttggccaggtgtggtggctcacgtctgtaatcccagcactttgagaggccaaggcgagtggatcacctgaggtcaggagttcaagaccagcctgaccaacatggtgaaacaccatctctactaaaaacacaaaaaatagccaggcgtggtggcaggcatctatagttccagctactcgggaggctgatacaggagaattgcttgaacctgggaggcagaggttgcggtgagctgagagcgcaccactgcactccagcctgtgtgacagacagacactccgtctcaaaaaccaacaacaacaaaaatacacaaaaaaactgaatgtcagtatctcagaacctaattttgaagatatgatatcctttttttaaagccaacttgacttgggcattaggaagaggaaatattttgttcgtttttaaataagaagtttgacagttgtcatcaagattattttaaagagtttgagccttccctaaacctattccaggatttggtactgaaagtctcctaagtctagtaggacaagcaaagtctctacttgtccaagtaaattagaaattcttgcagaattcatatgtggcaaattatcatatggaaaatgacaaaaataaatgattccagaaacataaaaaccctcaatatactagataaaatgtgtcataccagagagtcttctagtgccagtcaagatggagctgcccctttgctcttggtttcctcttaggaccaaaagtccctggtcatgacaaaacaagccagcacaggaaaagaagaaggcggattgcctggtgaccttgggacttaagggacaacacatgatgagttagccccagtcccgtaatatgtccaaagtgccgaggatatgatcaaaactcacttgaattacagcaaaacaggaaagacacccttgaataagagaacgaaatgagttttgccaacagcaagatgaatgagatgttgtaattattgggcaaaatatgtagtatgcagagaaaatacttagacaattacatctaaataatgaggacagtaaaaggacctaaatggaagtaagttttctacacttcactcaaagtgctaagccactctgatgacagtagactgtgctaagttgttgcgttacttgcttgggctgccataaccaagcatcacagcctgggcactttattttctcaccattctggaggctggaagtccaagatcatcaggtttggtgtcttccgaggcctctctccttggttcctaggtggctgttgtcttcctgtgtcttcgcatggtttcccctgtttgtttgtgcctgtgttcaagttttctcttcttatgatttttctttttgtattagattagaacctactgtaatagcctcattttaacatcattacgtctttgaagacccaatctccaaatgcaatgacactctaaagtgctggggcctaggactttaacattcgaattttggagggacacaattcagcccctaacatttatgtattcatgttgtaatatccagagcaaccacaaagaaaactgtacaagtaatatactaaaaacattatgaataaaaaaaaaatcccataaaatgttcaagaatccctggaaagataagagaagtagaagaatgagaaacaaaggggaggaaaacacaaaaaaccaccaatcatcaatattagcaatgaaacgtggtctatcactatagattctacagccactaaagggataagttgagaatactataatagacttttaactaataaatttgacattattctaaaaatcagaattggccgggcacggtggctcacgtctgtaatcccagcactttgggaggccgaagtgggcagatcatgaggccaagagttcgagaccagcctggccaacatggtgaaaccccgtctgtactaaaaatacaaaaaaaattagctgggtgtggtggtgcatgcctataatctcagctactggggaggctgaggcaggagaatggcttgaacccaggaggtggaggttgcagtgagccaagatcgtgccactgcactccagcctgggtgacagagcaagaccctgtctcaaaaaaaaaaaaaaaaaaaatcagaattaatggaccagtttttttaaattcactatctaccaataaaagaagtggaaacctgaatattcttctaccgattaagtaattgaattagtaattaatgttcccaaaaaagaaatcttgagttttatatggtgtaactggagaattttaccagtcagctaaagaagaattaacaccaattctacaaaatctcttccagaaagcagaagagaaggaaacattccccatcattttttatgaagctaatattacctgataccaaaaccagataaagacagcataaaaaagaaaaacaacagagcagtttctttcatgaacttgcacgcaaaactcctcaacaaatattagcaaatagagtcctgcaaagtttaaaagaattatacatcatgaccaggtgggatttctttcaggtatagaaggttgattcagctttcaaaatcaatctgtgtgatccaccatattacaggcaaaagaaaaaaaatcatacaattatatcattttatgcgaaaatgtatttgacaaaatataatacttattcatgataaaaactctcagcaaactaagaataggggaaaacttactcagcttgatactaagcatctacaaaatgcacgcagaactacaggtagcatcaaacttgatggtgaaagactgaggaccaggaacaaggcagggatgtgtggtttcactgtcattttcaatgtcgcactggaagtcctagcacctgcacgtggcaagaataagcaattattaggcaagtagattggcaagagtaaaataagtgtcctgatttacagataagctgattgtctacatgaaagtcacaaggaatctaccagataatcctaggacttgtgagttcagcaaggtctctggataaaagattatcacccaaattcagttacatttgtatataataacaaaaatcatgtgaaaaccaaaattaaaaacataatagtttttacagttgcttcaaaaaatgaaatacttaggtataaatctaacaaacaggtacagaatctattaatatatgctgaaaattataaaatgcaaatgaaagaaagcagagaagccctaagtaaatggagagatgtattttttcatggattggaagatttaacatagtaaagatgtccatttttccttacgtgatctgcaggtttaatgcaattcctaccaaaatccagacaagcttatttgaaaattttcacagaacagtacaacacctagaatagctgaaatagttttgaaaaagaagaatgaaattggaggaattagtctgcctgatttcaagctatattatatagctacataatcaagacagtgtggtatggcagaggagtagacacatagatctgaatggagaatccagaaatgaacccatgcaattacatcgacctgtttactgacaaaagtgcaagagcaattcaatggaggaagaaggcactggaacaactgggcatccatagacaaaacaaaaacaaaacaacaccctagaccaggggtgtccaatctctcggcttccctgggccacactggaagaccacaattgtcttaggccatagataaaatacactaacagtaacgatagctgatgagctaaaaaaaaaaaaaaaaaaaaaaaattctgaaaaaaatatcataacgttttaagaaagtttatgaatttgtgttgggctgcattcaaagccatcctgggctgcacgtggcctatgggccaccagttggacaagcttgcccgagactttaacctcacatcctatacaaaaaccaactaaaaatgaaatataaaagatgtaccacgtccggcctctctacgtccatgtgaaccaagccacgccatcgtggactcccctgatgtgggatgtcttccaaagtggatcggtactcctgagctctgtgtttcagcaaggcccgggagtcccattacacacatgggctgctgccaatgttaggagctgggagagctagtcaattcatttcagtcttaagaacataaaattctgaaaattgctgtgttctacacagttttagaaatgagtttggtttttgttatgacttgcttctttctttgaggatttggaaatgactaatcagaatttccacgagggagctagaaactcgaactgagctctaaaaactgattaggaggcctattccttcttatgagaggtgttcagataaatgcctgggctccataataacaataacaacaacagatcataatactaatattaaatttttataaaatcatgcttggtgacaactctgtgcttttggctcactgggtgagaggattttctattatggtcgtggggactgcatttgttacttaaagtctatttggtaagtgtatggaatctttggctgaagattattccttggtcacataactataaacaagttactttcttcactaggtgcttcaggaatacgatgctatgggttgaattacagtatttccaccatataattgtgagcttacttctcctaataaaagtactaacaagtaaatagattttaataaccactaaatgtcatgtgtggttgttaatatcttatttaccgacataagtatataatttgtatgtgttgatactttttcttccatagtactcccccaagtaccaccggcattaaaaactaaccatgtcttaaatattgaaaattccaggaagaacaaataaaactgccattgataaaaatgatgtagctctatttctaatgaatactttctttaattgttttggattattatcctgtaaaaagttgaaagcttggattatgccttcagcattcaggtttgtgaattatgaaactagtcttcgtcctagtctttcttagttgtcagtgaatttggaagatttaacaggtgttgtgatctgtatgaaattgatgctggagcaacacactccaccatgctccacaggtgctcttggaaggttctgggcctgcccagaaaccttacctcttctttgacgtatacatattttccctgtactgacaacccactcctcaggaatgactctattttgttcaggtgttagtaatgtttaaaagttaaaccctttgcagttggaggctcacatgaaacaccactccccaggcacagttaaagtaggagtgtctgaaccacagaaccctgagtatccccacagcaggttcacccagggtccacagcaggtccatccagggtccacagcatgtccaactagggtggccagccttctggcaccagaccgtacagggttgcccctgcagctgcagggaatcagaagcaacagaaccaccttaataaataccaaagctcggttagggagcatggagaagagaaaagcaaaattaacccctcccctttccctttaagtgttttttcacttttaagattacaaacatgttacacatccattgtaacaagcatacaatacaacggcctattaaagacaatgaatttgcctttccattccttgttctctctcaaggaatgaccaattcttgaggtcattctctcaaggtgaccgctcaaggtgacctcagaactcttgaggttctctctcaaggtgaccaatatcaatagcttggggcatatccacccacagttttctagctgctcttatatatgtcttcagctatagaattatacacctttcaaatgactgccttgtaaatgctcttttgacatatctgtttcccatggtgaggattttctttaataattagtgggaagataaataagcacttgtattaatgaacaaaaggctggctcagccagaaccttatggagctgtgctgctcaatatttggaaattaccaagttgaggtagtttcattgtaccttacttgtttatcgaggttatagaaaatgaaatggcccttgccttttagtgtttcaagaagagaaaatttaatgaaatgtgaagtcacttaaaaatattagcttctgtttttaggatctttagctattctgcctcaaaacaatttcactaattttatttctatatcacgttttctcatttctgctcatggcaattggctgaatcagtggtacgagccaggacagatgaagttaaatcgaccaagtgctgttgccttccagaggcgtggcatgagtcagtcatggccaaagtggcgcgtgagtttgagtatgaatgtagatgctccctatccagtcttagtaggatgtggactttaaaaatttgtgtttgtttattggttggtttgttgtagttttgtgtatgggttttattgaaactgttctctcattcactcactcactcccaaggaaacactgatatatggtatgtctagtgacgtgctgtgcatttgttccacagacaccaacgaggcatggcttaggtcgcctggcctcagtgggtgttttgcctgtaactttttcttttgcatcatgatactttaaatgagctgatctgcctaggtaggaacaaaagccccaggtgctgtttgcttcctcagctgaatcgaagacagactgtgcaatacactgaaatacactgggatcacacaagacagagaaagccatggtaacaaatcatagaatttctttccactgttgtctatgtggaactatacatttttcaaaccttttaaaagaattgagagaaccagaggaaacagatagaataatttgatattaaatggcagacataagccctaacatgtcaataatcactttaagtctaaataatcaaaatacaccaatcaaaaagtagagattggcagagtggattaaaacattaaaaaatttcgatgactcaactatatgctgtttacaagaagcccactaaaatttaaataacatagattgaaagtaaaagaatggaaaaagatataccatgtaaatattaattaaaaatttaaaagcaggagaagctatggtaatattcaatgatgtgaaattcagagtaagaaaactattagagatgaagaggaacgttacataatgataaaaggatcgattcaccaggaagacatgatgatcctaaatgtgtacacatcaagcaacagagcctcaaaatacatgaagcaaaaactgatgaaactgaaagaagaaatgtataaatctataattatacttggaaaaggtatagtagtatacacttcctgaattgtcaagcagatttgatcagccaatcaaccaacaagatctaggttacatgtatggaatactccacccaacaacagcaaaatacacattttttcaagggcttatagaatgttcattgagatatactgtatcttgggtcacaaaacaaatctcagaaaatttaagataattgaaatcataaagaatttgttctgcaaccatcatgtaatcggactagaaatcattaacataacgttttaggatggcggttatcaaaaagccaaaagacaacaaaagacaacaaatattggtgggggtatggagaaaagggaaacttgaacactgttggtgaagtgtagattggtgcagtcattatggaaagcagtatgctgatttttaacaaaattaaaaatagaactactatatgacctctcttctgggacaaaatgaaatcaccacttcatatatatatctgctttcccatgctcattatagcgtatccacaatagccaagatatggaaacaacctaagtgtatatggatggacaaatggataaataaactgtggtgtgtatatacaatgcaatattattcagactttaaaaaagaagagatcctgccatttgccacaacatgaatgaacctggaggatattatgctaagtgaaataagccagatacagaaaggaaaagtttgcatgatctcacttatatatgcaatgtataaagtccgtcaactatacagaaacagaaaataaaacaatagttaccagcggtgggtcctgagaaggaaatagggatgtgtatatcagaggatacaaagtagcaatatgtaggatgaacaagtttctagacgtctaatgcataacaggagataataaaattgtactgtatttggcattcctgggaaataagtagattttagctgctcttgctacaaaaaacaaagggcaactatgtaagatgatagatttgttaatttgctttactatagtaaccattttattatctatatgtatcccataacatcacattgtatacattaagtatatacaataaaattattttaaaaatattctgagcagtcctgcaggaaagaaaggaaaaaaagaaggaatgaaggaaagaaagaaatgaggaaagatttcaaaggtatctaagtttttaacttacagaaaatagaaaaagaaaagcaagaagaatccaaagcaggcagaaggaagacagtactaaagagcagaaactaatgcaagtgaaaatagaaaaatagagaaaataaatgaaacaaaaagctggatcttcaaaaagtcaatacaatttataagatttagcaggactgacaaaaataaaaggagagatgatgcaaatcatcattattggaatgaaatgagggatatcactataggtctgcagctattgaaaagataaaaaaggaacactctgaataattttatgctcatgaattcagtagtttgaagaaatggactaattcttcaaaaactgccaactactaaaactctatcagggttcaataaacaatctagccctatagtcattaaaggaatttaatttataattgtagtagtctgccaaggaaatatcctggcctagatagcttcacaaaacaattccatacagtctcttcaattttacacattccttttggaaatgagaactagcactagctaggctttccagtaagatattggagagaggtagagaaaaaaatcatcctcgccatattcttagtcttaggagaaaagctttcaatctcttaccattaaatattcctagtcttaggggaaaagatttcagtctcttaccattaaatatgatgttaggtgtaggatttttatatattacttttactatattgagaatgtttccctgtatttctggttccttaaggtgatcttcatgaatgagtgttcagtgttgtcaagcggcttgtctgcatcagtgggtagaatcgtatggtttttcttatttgacttactcatatggtgatttacattgatttataaatattgaaccagctatacatttgggaaatgaagcctccttgcttgtgatgacatttatgtattcctagatttaatatttttaatgattttggcatgtagctttatgaaaaacgtggatctctagttttctttttttgtagtgtttttatttattatttttgttattagggtaatgctggcctcataaaattaactggaaaagttctctctaattcaattttctgcaacagtttatagaatattggtattatttcttcctaatagatgtttgatagaatttgccagtgaaataatctgggctttgttgtttttttctctatggatggcatttaatcactaatgcaatgtcttcaataaatatatgctgttcaggttgactatttcccattgagtgagttttagtagtttgtgtctttaaaagaattggttcatttcaactaattattaaatttgttgatatagttttattaacaatttatcaaatttgcatagaattttatctagtattcccttcttttaatgttcatgggtgattagtaataacccctctttcatttctggtattgataatttgtgtcttcttcatttttttttcttggttaaacttgcaagaagttcattaattttattgatcttttcagagaactagcttttggttatgttgattttctctattttcttttcagttccattgttttatactcttagtttttatcacctcctttcatctgtttgttttaggcctaattttcttttcattctctagttctctaaagtaggagcttaggaattttgattcttttctaatacatttgtttaatgctaccagttttcctctcagcactgctttaattttgactgacaaattttgatctttattttgtttttaattagttcaaattattttaaattcctcctgagactttttctgtgatttatgggttattgcagagtatgttgtttaattttgaagttttaatttgccagctacctattagtcattgatttttattttaattccatcatggactgagaatagactttgtatgatttctgttcttgtaagtgtgttaagatgtacattatggttcagtgcatggtctattaagatatacattatggtctagtgcatggtctatgctgctcaatgttgcatgagacttgggaagagggcttgttctgctgttgtcggatggagtattcaataactgtcagttagatcaaattggtggatagtgctgtccaggtcatttatatccttactggttttctgcctgctttgtctgtcagttaatgatgcagtcgaatctacctagaatagtggatgtctctgtttctcctttcattactatcagtttttccttcatttattttgataccctggtatttaggtttctacacatttaagataattctgtctccttggagaattgacccctttatcatgatggaatgatcctcctcatttctaataattttttttgttctgaaacctgattttctgtaattaatatggctattccaactttcctttgattaaagttagcactatgtaccttattggcataggaaaatgctcataataaaataggcaaaaagggagagaaagcagctaagagatctcttagcttcgtttctctttttcacctatattattatgagcatttgtgcacaacattctattgtatgtatgtaccagagtttatttaaatattcctccgatgttacacatttagattgttgtaaattaaggttgcagagcatatacttaccccacagtctttctttggatatataatctttttaattaatagattttattttttggagcagttttaggtttacagaaaaattgagcagagtttacagagagttcccatagagtccttctcccactacatgctgtttcccttactattagtgtggttagttgatttggtacaactgataagtcactattaatgcattttgttaacttaagtttatagtttaccttagggttcactctgtgttgtacattctgtaggctttgctgaatgtgtaacgctatgtatctactgttacagtatcatacagaatagtttcattacctccgatcccctgtgttctacctaggcatcccttccttctgacaaatccctggcaaccaatgattgttttcctgtcgccatagttttgccatccttttacttttaaatactcagagttgtcatatttaaaatggttttctcagccgggcgcagtggctcacagcctataatcccagcattttgggaggctgaggtgggcgaatcacccggactcaggagtttgagaccagcctggccaacatggcaaaacctgtctctactaaaagtacaacaattagccggatgtggtggcacgtgtctgtggtcccagctactcgggaggctgaggcaggaaaatcacttgaactcgggagagggaggttgtagtgagtggagatcgcgccactgcactctagcctgggcgacagagcgagactgtgtctccagtaaataaataaataaaataaaatggttttcttaaaaacagcatttagctgggtctggggtttttgtttctttgtttgtgtttatatccactttgtctatctctgtctattaattggtgtgtttaggctgttcatgtttaaaatgattattgatatatttagctatatatcaaaaatcttttaactgttttctattccttgcatttgatttttgtctctttttctctcttgtttcctttggtttaactgagctttttatatgatttcatttatctttttttaagcatatcatttatgcttatttttaatttgttaatagtcctagtgttccaatacatggcttaaaataatgtcaaattactttcaaataacactattctgcaccatgtataaaccaggtaccttgtaacagtgtattccttatttctccttcctatgtctcatacattactgttgttaatttaacttatatatatactaatacattgttactgttattgcttcaaagttatattttagagcaatttaaaatagtaaacataaaagatttttttattttacctccacttattgcttctctgatgttctttctctttttatgtagctctgagtttctgacctatgtaattctgcttgtagaactttttttttttaacatattttttgtagagcaggtatgctgacaacaaattccctcaattttttttttgtctgaggaagtctttatttctctttcatttttggaagcacagtttcactggatgtagaattttaagttggtgagtttttttttctttgaacaatttaaatattttccttcactctcttcttgcttgcataatttctgatgagacatccactgtaattcctaaactcacacttctataggtgtggtgttccccaccccaacccatccgtggcttctatcaggatattccatttgcctttgttttttgcagtttgagtatgaaatgtccaagtgggttatttttggtatttttcctgctcagtgtttgatgagctttctgtatctgtgatttggtgtctgtcactacttttggaaagttcttacttttattacttcaaatattccttctgcttcattctctctttattctcctactggtgttcaaatgatgcatgtgttatattaatatatgacattgcctcatagttcctgggtgttctattccagtttaatttttttcttttccctctttctgtttcagtttgtgcagtttctatttacttatgttaatgttcagtgattctttcctcatctgttttgagtctactcatgaacttttcagaagcattcttcatttttcttgtgcgtgtgtttttttagtatctgcttttgattcagttttagaattttcattttgcttcctttgctcttgcatgtcctctgctttttccctgagagtccttagcataatcatagttacttcaaattccctgtctactattcccaacatttctgtcatgtctgattctgttctgatgatggtttgtcctttcagactgtgtttttacttgcctattgatgtgccttgtacttttttactgaaatccagacatgatgtgttgggtaataggatccaaggtcaataggcctgtagggtgaggtttctcgctagactgctggcagcgggctttgtttcttgtgtgttgtatctgtaagtagcagagcttcacagccttctggtgtcctcatttttgtcttcccctttggatttgggtctctcctgtgtgctgttcttcagagagggtctacgccttgtagctgtttcagctgtaacccgctgctatagtggagctgccttggtataggggctgtatatggggtggagggagcattctgtacttttctgcttcaatctgtcttgtagcaggtctgcatctcagggctgtgagcttcctaagtgtttctgtccctactccagtgatagttttacccccaacctccattccccagggtgggatggattttcacagttcagctcttgcaaagtgatttccccaggagagtaggccttttcatggagaaggttctatgaatgttttacaacagttacactccccattcctctgccaggaccaggaggggatctattttggatccttaccatgagaatctggtggaacgcttgaagaaaagttcagtaaagtgtaggatctcccttaaggcagggtcccacagtgttttctgactctcaagctagtccacactcagcctccagcaagtcatcatttcaattcccatcattttatggcccttgtggattctgctccaagcaagcagatctttgcagtgtctctcaggatgaacccatctctccacattttagggtaacagtgttttccggtgacttcagttctctgatggatttagaaaggtcagtgattttcaatttgtccagctttttcttgttgtaaagcaggagtaacaacatcctagctctcaatatatgtatgcgcagattcttgatgtcctctttaatttcttttttattttccccttaaccccgtatcttcagcatttacttatttcattgatttttttttttttttggtatggggtctcactgtgttgcccaggcttggagtgctgtggtacaatctcagcttacttcaacctctgcctcctgggttcaagcgattctcctgcctcagcctcccgagtagctgggactactggtgccccccaccacagccgctaatttttgtatttttagtggagatggggtttcaccatgttggccaggctggtcttgaactcctgagctcaagtgatatgccctcctcggcctcccaaagtgctggaattacaggtgtgagccaccatgcccagccacattgattactttttaaaacacaattttgtgatgcttttatgtccattgtgtggacaccctatcaatcagtcagctaaccccttatgagcgattaacttgctagtttacagcactgtggtttgtttacagacctttttccccgttgtattatatttacagctagcaatcccttacaacatggaaactttgttcttcaattctaagaataaagtctagaaatgtttctttgataattttctgtaatatatttcttctgattttcctttatagaattcctacaattcagatgacttctggagggaatcatttattttgcatatattttctccactgcttttcagctctgttttcctaatcattgggcctatattttttcaactttatcttcctttcattctatttggactatcttattttttttccaacagttattttttttctgaacttgtctcttgactgcaataatgattatctctttaagatcaataataataatttattgtgtattatttccctgtacattctttctgtttcctccaagttcccttttcttcctgttgttttagtttctgtttttgcgttaattttttctttttagttctctagtgaccccctttctggtctgctcatagactgacttgatagccatgtatgtgacaagtagatccaaatcatgtcatgacatagaataccaaagaagagttaccggatggtgaatgcagaaactgcagtggtgtagtgacccaggtggagggctgggggtgatgctctggtcattgtccatcagggctttcatgcctatagaggatatacactgtggagcttaaaggcctctgcacagtcattatacatttacagcagagtggccctagcttcttcattggtcagttctttataccttccacccaaggaccccagcttcctgctttgagcagtgggcctcttcaggtattcacttttaagtgaaataagttttaccaaaaatttaaaatctgacctagaacatagtctcctagatgactgaagtatgtttaatcgcaggtggggatgtgatacttctatggggataaacctaagactgcctgattgcctggatgccctaaggtgtaattcgtagaggaaaaggtggacaaatacttgagtctttcccctttacttactagtttgagtgatgctagggaaccagctcattattttgcaaaaatgaccaacatatttaaaaaatacctttctaaaggcaagagataaacatatttgatagatttcaatccattgtgcttattcttactaaaccttattctttcttatcttttgccagtgggcagaaattaaaatttatttccaagacctttggatatactttcaatagtttttaatagattatttgcagtctgttataaaagatgctctaggcttgtctcgtacatttcttggctcaaacatagaatgactaattattcaaaggtccctggtttccttttctaccaaatagtatttagagactgctttccagatcccctgggggtactgattgccattacagtagacattgtttctaggatttttcagtggaatgttgtagaaaatatatatgtttaagctataatacatcatgagctcaccatgatactttaattcaaattcagggctacctgatcttacctaacttcatcaatcttatagctgtgcattctttctcccatggttggagattccagttcactgactttattctttatttgctttaatccataacacatgcataacagtcccagtataaccataccaagaagcagtgattgtttgaattctgaagtgcgctttgctgtattctccacaaaaagagaataattttaaaatgttgacttgaaaaatagtcatgaaagtagctgagtgagcattaattaaacatcctgctgtgttttctgcatagttttagctcatgaatgaagacagtgatttaaaattgaaagcagaagacaaagttaactgactagataatgaaaggtgcagacttattaaaggcataagagaatgcttacccaaaggagttatcattctttttttttttcattaaaccccttccattctagcacagaaggattattctatttgctgatggaaatataccatcacatggaactcgcagatgtaattagcatttgcaggtttcattgcaaagatatttattatcattattacctgagttaagtctctcaatagatgctattggtccttgaattctggaaatattaatttttagataaatgttgataactttcttgctgttaaaatttatctttcatattatcacagccaagaaatagttgtaaataaaaatgaaataaagggaagtgagctacttctgtaatttttttttttgtaagtaggctattctttttcactaatggtggcagttaggcaggattctattgctaagaagcctcagaggaccccaaacaaccatgcttacaaagccatggtttattgcaggaaaagggttcaattcagcagcagtattaaataaagaatatccacggcagttaaaggctccctccgggtccagctgcgagctccatttggccttatggaaacacctctgctctgagatcacgaaccactgaccagtgcacagaacacggtggacccagggagctgagggcggaatgtggtcaggatgttttagtactctcctgatcacgtgggcattttcctgccacacatccaacccaaacagcagatacttctgcgtttctcatcaataaacaatgctgaaaagttggtacgaatcccccaaaactccttggatctgtgtttgccatcagtattgccaatgattatgtttcatgcctttactaggtgctaagactatgcaggtacatttcttatttcagtctgacagctcaggctaattacaggcctgctggaaccagtcctcccaacatacctttgaacttcatattatctcaatatatattctaaatcaacatttattttcattgtaatgtcccaaaattctttcatgcatttatgaacagagtaaaactttcaaaattttcaattttcaaatcaaggcagttacatatacatcttgtaaacaggatttaatggtgactcctgtcaaacgaaaaccagagctagacaatgaaggggtaaagtcagattttactcaagacactgttacggtaggaaaatgaagccctcagtgcagaacttgggctcaactccagatttaacaaggaaaagtgagaatttatatgcaaggaacagagggtgggatccagtggagggaaaattactaaggggaaacatcagggttaaagagattctggctaaaccaacctcaaccaacctgctgaaggcaggccatggtggccagatgtcgcccaggggatggaggaggatagagaatgtcatcagatatcaagggtggtgagttctggctaaactgacttagcaggattcatgctacacttgggcccctggggaacatgcccaaagacggaacctagctggactcagaggaggctgattaaagtttggtcaaagagagagtttttgtcattgttccttcttcattttttccgtaacagttacaataatagcctttatgatttgacttttatatatttttttctcatatatgtcttgtgtttgttctatatcattttatcttgcattccttaatggcaaaaacactagaaacatccactatctacctatgtcatccaaggcaaattgccaggaataaggaaagattctagcaaaataatactagtactaccacttctactatgacaactacttttatactaagaaaaagaaggagaagaaaagtgaggaggaaaagaagaaacatagccaccatttactatggttgcagtgtttgtatttctctaaaattcatgttgagacttaatctccaatgcaatagtattaagaggggggccttaaggaggtgattgggtcatgaggactcctttcttgtgaatgggattaaggttttcataaaagaggtttcacacagcatttggcctttttgcccttctacctcttctgccatgtgaggacagacagcattcatgccttcctccctgtaagggtgcatcaagagataccatcttggaagcagagagctgtcctcaccagacactgaatccaccagcaccttgatcttggacttccccacctccagaaccatgagaaatacatttatattattcataaactaccaagtctcaggtatcgtgttatatcagtacacacagaaagacaccatttaatcctcacaacagccatctgaggtaggttctattactgtcctgaattttggttaagcaaattcaggcagaaggatgttaaacaatagctcaaggtcacaaagctaataagggaaggaaacaatttcaacccagacagtttggctttgcagcccaaagcctttgtttcttaccttgaactccctttttaaaaagaaatctcatttcattgaagtattttctttgaaactttattcttgtcttacatatgtaaatgtctttcccaccccctactctgtgaatctgagcactaaatttcagtttgaagtcttctcctctggagccgaacaatactcaaagttttttaggtgcagatactagcagaccacagagaagtgagtcctctctgtgtagcctaaatgagtcatattatcccagccttctcccaagacacacgcattggtcctcctataccattttggggtagggttgggtcaaagggactcccatgaggagcacttgaattgaaacaaataaaatatgttttcatatgaactctctcaaaaacgtcatagaaaatgattggcagatttccaggggtgaggtgttcttcagaacaacccattcccatttcagggctgctcagattattagaaagtttttcttcatctgctaatactatttctgacctctggaatgattcagactaagcctacttcttactagctctttatctaatgaaaaataatttaaataataatgacaacaataataaccaataatgctgataagtgctgctgtgtcctgtatatctttctaagcccagtgaatgtgcttatacattggctcttcaagaatgccctctagagaaaggggctgatattctgatctttgttttacaaataaggaaacttaagtgtaaagggggtaagtaacataacatgcaggtgtaagacctagatttgaacccaagcagtctggctcccgtacttaaccaatgtacggaaccagaatgatacaatggcacattgtccctctcacgacctcttctcttaaccagtttcaaggcttcatctttccagaccattcttcaatgctttagtttatagtctatccattaagtcagtccataatgtaattctttaataataacttattgagtgtcaaacatgctgccatgcttggtggaattctccagatgactctaatttgtggtacttctcaaaagtgaccatggttctccaaggcctggaacagagagggaagggactactggcagcatggcttatgtgtacgtattatatggtacacgagataaggatgatggcattgactaacatggcatttcaacctacttgctttccctccgaacaacatgtcactcatgaatttggtatccaggccctctgttttatgttactaattctgatattgcaaaaagaacagcaccagggcagatgactgagacgtgccatggcagcaatgtccattagtgtcatttgtgcatgtacttaatatacaactactgtgcatctgactcggttcaatttgtgaatcacccagtgccttaagagttccactctgaagctgtttgtcttaccatgtagaccacactggtgcagtctgaataaaattggtaacataaaattttaccaaaagtcataggaaaatctagggttatgtctcagtcattctgctgattcactaatgaggatatgaaatttaaaaaccatacccttcatgctatatttacccttcatgtattattaggactttctgggttcttctgttttctttagatgctttggagtcttggcccagagagttttataattttggcaaatactgatgtcaggtttgatggaatacaccaaatgttgcaacctagtttcaacctagttgactgaggggatcagtacacactgccccaaaatatggcaccgtggcctttgagggaacaacagaagcagaaaggtcactcacagacattctcctaccattcttccctgaagcaggccataaaataattgtctaatcttccactatcataagaacctcatcccagcggtattctccctgtacctccctgtacccggaggaaaggtatgaaatgtggagacaccaagaagaatctgaacacacagaccttgctaagttctccctgtttcctcattgtcagatcacacctcctttcatccaattacacctctatgcaactgtccactcttcatcagacccaagcataaacatatgccattttccctgtttgtttgggtcttcgtttatgaaggctccagtgtaacataaatcttatactaaatacatttgtatgtttttcttgataatctgtcttctgttatacgagtttcagccatgaaccttacaatggttaaggaaaagatataactttttcagtcctacatgtttatggtgaaatatgtcctgtagacgtggttagtttggtttgcatgatgatagttatctactgctgtgtaacaggggagcacagtggtgtaaagccgcatacacttactgcctcatgatttctgcaggtcaggagtctgggcatgtcttcagtgagttctttggttaaggtctaatgaggctgaagttattgtgtccttgggctgtgttgtcatctagagtctcaaatggggatgaatgtgcttcactcaggtcattcatagaattcatattcttgtgatttcaggactgaggtcattgggttcgtatggaaaatcatctggaggcttatcacagctcccagccactgctctcagctcccagaggtgccacagttccaagaagccatctccatttccttggcacatgggcattcccagcacagctgctgacttcattaaggcagcaaggagagcccctagagcacatctgctagcaaggcagagtcctgtgcaatgtaatgggatcatgggagtgacgtttgtcaccttgctgtactttattggttggaagcaagccacaggtccttgtcatactcaagaggtggggattaaccgaatgtgtgaacaccaggaggtggggatcatggaagattcctttgagttcgtcggtgacaataatgtttaaacaactgaattcactgctaacaggaaatgtcaggaaatttcatattaaaactccatgtgtccccagatcttagaaagcctgatgccagatctgcttttacatgccagatctgcttttatgtgaccagtatcagtgtgagctgagaaatagctgcttgctctgagcagttgcattgctactcatctcatcacaatcctttcttgcttattgtatgttgctgttgtttattgtcttgcatgcataggtgcttttcacacatctaggtgcttcaattatttgtgttatctggctggcctctggtgacatttgtgtttttataactcctggtctatgtgtgatgttacttctttccttagggatgcatactcttgttgactgttctcattgcttgtggaattctggctattgcttttgccagtgattgtagggaaggtcatgatattttatctttggcccctgataaagtaattagtaattatggagtgataaaaagtaataagcaattatcaaggtctaattgcgtgtgggccttctgcttgtctataggcgctcctggactgggctcctagtaagcaggctgctggctgtcattgccaaccaatactcctttggctgaggccaattcttgaaggccatcttcttgttatcacaaggttgacttacaggaaatgtattaaaatctcttaagttttttgaccgtgtctcacataatatagatattcacctgggtcaaaggcagcctgagattatagctccattgtcataaaaatgtcagctaatctccccagttgttaatatctcagtactcttgggagactttgctcattttaaaaatcaatttttgctcaagcgtatgccaaacttagttgaccttaaaataacaaagtaagtaatctgaggtcatccacagcctggcattcagagagtctgctgccttggggaaggaatgccattcaatttttggattccattttcacttcgtttattatctctagctagcaaaattcttttagacaatgagagggtggcattcttacagagtagcttatgggtctggtgcactgcacacgtcagccccatgatgggaaccaggtaaggaatcaaatgtctggttattctggaagctggttaattttctcaccaacagaatggagtttgtgtctggggtcagtctttgaagctgaactgagatgttcacggttgctgtaaggtagatgttcacaggctccagatgcctttgcccttggagagtgctcacattcgtacctaacagcttcagagatgagagccttaaagaggggctcaacttcccttcggcgataccaccctggttccatcatgtctaatttccctttgagcagatggcacctaagttattcagtcaatagctatatgcataactacatagtgactctgggttgtgcagctaatgtgactaacagtgactgtgtagaggctgtgcctggggctgttcagccagccaccaccacagtgatgctgtgcacccctctaaatgctgtgccacctactgttccaagctctttacatacttagaaaggatatgtaatttgcccaaggtcataacgctagaaaatagttgagccagtgtatgaactcaggcagtgtgtttccaccacaatattatacataaccttaaaaggttgagtctataagatctgtttggctaataaaaaagagtgagattctgtttttttgcaacaacatggatggaactggagatcattatgttaagtgaaataagccaggcacagaaagacaaacaccacatgttcttacttatctgtgggatctaaacatcaaaacagtggaactcatgaagatagtagaaggatggttaccagaggctgggaagggtagtggagatggagcggggaagtgggaatggctaatggatacaaaaaatagaaagaatgaataagacctaatatttgatagcacaagagggtaactttagtcaaaataattgtacattttaaaataactaaaagagtgtaattggattgtttgtaacacagaagatgaagccttgaggggatggataccccgttctccatgatgtgattattatacattgcatgcctgtatcaaaacatctcatgtaccccataaatatatacacctactgtgtacccacaaaaattaagaatgaaaaaatgttttaaagatctgttggccaaataatatagatactaacatttatgtgctcaacactgtactgttgtatatgcagtgtgccatgggattatcagaccaaccctgtgatagaagctattattatcttctttgacagttgaagaaagtgaagcaaagaaacatgaaataacttgttcaggttcccacagctagaagtgggttcaaacccagcatctgcactgttgttaaccagtctgccacagattattccatgtgtggaggaattatccctatgactctgctttgcacttggtaaaaaataaaagcaattgagagagaaaagcaatgcaacatgatttcagggaaactcctctcctacagaatggaggtgcagacagcctgtgccctggagaaggtcactgcactgctcgcaaggctgggctggctccatggccaccagttgaaagccttacaccaatggtgtcagtagatgccttggtacgactttagctactgcctcatgctccacaaagtagagaattaggtgacgattgcacttgaagcttagtaaagcagcggagacccccttcacccagagagcttcactcacttccccgtgtagctcattttggtatttggaaaagaggctgtgtttagcatggaaagcaagccgggaaattgtttcaggaaggttagggtggtccccaaagccaatctggcccacctctagtaagatgaagggcaaagatgggcctggctggcagtgatggtgtggagctcaggggatcccctttttccctctccctttccatctttttctaagaagcgtattaccctcacatgctgattttgcctaataggacatctgtgaaatcactctttctctttgtcagtgaaactttaattgaaggttggaatatgctgatgggtaaaataggtgtgtcaatatgttagtgaaaagaaatagatgagttctcattcttgtaggtatcagatatctttttgactcttggacattgttatggtctgaatgtctgtgtccctgcaaaattagtatatagaaacgtaacccccaagatgatagtgctaggaagtggggcctttgggaggtgattaggtcctgaggttggagccattatgaatgggattagtgtgcttataaaagaggcctgtgggaactcactcactccttccagcatgagaggacacagcaggcactgtctatgaggaacaggccttcgccagacacctcatctgctggagccttgatcttagacttcccagtctctagaactgtgagcaatacatttctgttgtttataagttaatcagccatagcagcacaaatggactggcatagacatctcagcccgtattctttgttctagcccatcggaaaatgatgggtgcgtatgacacacagtcccagtggtgtcccgagtgattagcacagtgggagtgataaaaatgactcccattccagcccctgctctcaaacgcttggtgctgagtggggtgaaatacacacacgaggatgataatggaggcattgctgctgtgtacagcaggactcgaaccagggaggcaagcaaaaggggaagccgaggccactgtggaggcacagcagtccctgaggtcactcaaggggttaaggaagctggcttttgggcctgttctgggaagggccattcaccactcactagacattttctggacacccaggcggccggagccttccctgctgactcagccctgccttggaagcctacgctttagtgggctgaattaaattccagattggtagaggggtgtttggagggcagcggtgaggaggtcaaccctcagcagtttaactcatgttaagatcacagaagaatggtctgtgtggatatcttcttagagcctggggacaaattgcaatgtccatgatttctaccgaaatagacacttctggatattgtaaagccatagtgttagccaataaatataacttgtggaaggggatcattggaacaacagtggtaagaaattccgtttaccacattgtatctagttctgctgtacctaatcttctaggatcttcagggcagccctgtgaggtctgattacactcacttcacaggtgggaaatgaaggccagtggctctgctgctgggctctctgtccaggctgcatgaccaaaccacctctcctcctagcatctggagcagagccttttttccatgcaggtaaggcagatgtccttgccctaatttacagtgtgatccggggaaatggagggagagacgatgatgcccatgacagagtcttgacaatgggtcattgctgaagtcctgttatcattgattaatcatcacggcttcctggtaatgcctcagtctttcagagcctgactcagcgcctcttggctttagataacagctctaccagggaagcaggggagtagggggaaggcccagtagaccctgggggcaacagctgtgggtgcttgagccagctcaccccaggcaccagcttgttgcctcaggcaaggccccataaaggttatctctgcttataaaaccctggaggagctgttctggttcctttgaaaaatagactttgaaagcttgcccaacctttttctttttcagcagtgctgctgagactacctgtttgatgtgttataattacattcactctaattatggctactgatttcttcaaaacctcagcgcactctggtactattcttcctgcttgcttactgctgtgtgggattatttctccctagatgttcaccagactttggcttttaatgacagcagccagttgcatttccaaaacattttaatttaattatatttctcaaaccaaagagatgtagtgtgatgatatgccgaaagactttttattagtaaaaaaaagaaatatttcaaatgaaatgtatcgctgttttttatagccactgttgtacagtggaaggtaattcaaagataggtaaagaaatagtgttgtcacagaaagataaatattgcatggtctcacttatatgtgggagctaaagaaaaaacttgagctttcggaagcagagaggagaatagaggttattagaggctgagaagggaagggaggaggagagggtggggagaggtttgttaatgcgcacaaagttatagccaaataggaatgagtgctgcagggcaagtattgttagcagtaatttattgcatattttcaagaagctaaaagagaattttgactgttcacaacacaactgataagtatttgaggtgatggttatgctacttaccaggatttgataattacatattatatacgtatattgaagtatcactctgtattccataaacatgtacaattttatgtgttgaccaaagataaaggaaaaaataagatattagcattgttagacattagctattaactttgttcgatattagcattaggtgttagatattagtattctttgcgggagcgctgtgtccctgaaaggaagagtatctctcagagggaaacagagacagcagccatgcgccacatagcaactggccgctgtctgccgcaaggctgggttgtgtgcactgtggcactcgtcctcaagtctgcttgggactattgcaaacaccaaatgaaacaccatcttcaactttgcagccaaatgcctcttaatagaatgagggcagataatatgatctattaggagcttccaaatggcatgttccagtaaaaaggaagaactgccttatgcatgcaactcagcagagatgatgattagacacagtgattgcagatcacagcgcaattaaatgtgtcttcccttagcctaaatccacggggagattggagagacacaatctcacgtgcttacagcaaccagcggcatgacataaaaccagtgagtagcaagttgagagaacagggcttctttattttacactttctttactaaacactttatatattgtcttattggatccccacaaatatcctaaagataaatcatattatcaccttaatttacagataagaaactggggcacggagaggctcagtaacttagtcaaagctacccagcatgtaggcaggggagggactcgcgattaggtcttgtctgacttggtgaatccaccgtaacatttgacttgcattcggtcctcaatctttcccaccgacagtagcatcagtactgttctcagagtgcttccaggcctctgacttctgaccatcttcaggagggcacttcctggctgtggctgtggctgcactgtggtgcgccatggccaactggctgggggaggccatgggttttccatggaagcgatgggtgtcacttccaggcctgagcattgaatgctggggcgaggcctttccgagctcccctgccctctgctgtggtgagtcatctccccaaagtggagcaaatccatggtgaggatggaatagcactgagccactgggcaataatgctgttgtttgaggcctctgaacttgcagcaccgccttttgccatagattagtttagcccgccatgatggattcgagacaggtgctagggatggatggcataatgacccaaaacctgaaatatgcagcattggcttcaggtgacagcgatggtgatggagccctgagtaggtggaggacatggtgaccctggcatgtagtgaggtagcattnggcctcaggggcaataacttggaaggcaggtcaggcacctacagacctcatggccagcggagagattggaaaatagatttttaatagtatacattgctgggtattgattgcatttggcagggcattaaaagaaaaagatgatcctaaaaatcaagtggtttcagcaattccacttctaagtgtatatacaaaagagttaaaaacagggtcctgaacacatctgtgtataccagttttcctagcagcattgttcacagtaattaaaacttggatgcaacccaagggctcactgatgggatgaatagataaaatatgatagatatatagaatggaatatgattcagcccaaaaaaggaaattcttacatgtgctataatatgcatgaaccttgaggacattatgctaagtaaaataagccagtcagaaagacaaattctgtatgattctacttttatgaaatacttagagtggtcaaattcatagagacagaaagtagaatggtggttgccaggtactgaggggtggggggtgggagccgtttaatgtggacagggttccacttggggaaagtggaaaatctctggggtctccttggaaatcatgtctgcttttaggcagaaagcacagcttcttctgtgaattctaatttctgcacttcacggtggagggagtacttaaagataccaacgaacagaatgccagcccccacacctttatacctgcatggccaacacgtgcttaagcagtgtttgttttggtgaccgcattattccctttttccccaagtcatcaacttagcattcaaagcaataatcattctttaaaaaacaaaactcatacttcatctatattttaaataacaatacacgtgtttacaacaaaaatagcctttggccttggcagatttggacagcacacagtcggcagtaagaatagagaccccccactggtaggtgtggagggtggagatgagcctggacagctgctctgtcctgtgagccagccacgtgggtgctggtgataaagcgtctcctcagtagataagagattacaaagtgagaagcaggaaatgtgacctgggtatggaaggcgataaaatggacacatctcatgacatataaagggaaacctttcatcctttaacatgtggtttgaggccagggatggtggctcacgcctgtaatcccagcattttgggaggcccaggagggagcatggcttgaggccaggaattcaaaatcagcctgggcaacatagtgagaccctgtctctacaaaaaagataaaatgtggtttgttattgcgaatagtgcttggcgtccatatctggtggaggagagcttgtggctgctgtggtgctgtgtgttgtgtgtcgctctaccttgtggagggtgctggatgccacagattcaccacacacgtctcccttcatgcatgatcaacccatgagtcagtgctttaagacttatctcaggtaccggaattatttaaaataattgtccagaaggcttagttttggggagatccattgagcgagtcatctgcccacgccttgaagcccataatcctgaggttgagctgcagccagcatggcttcccttctagtgtgtgaatgttttacagagtatgttgtcacttgcattgacacgttgctgatattttatatatttggatggggcattgatgaaataagtgcaacactgagcatttgtaaagcagaacaatttgacacagttgttttgttagaacttctccacaaccatgggaagaaggcagagatagaaagccgagtccagaactgaaatgacttattcgcagagccctctggctctagacaagtgacaatttctggggttctcctactattcctattgcaggctgcagttacctgccagcagaacgatactgtgtgtctcattatttcaatgaggtcaattggatatttttaattgattttcagttttgaattttatttataaaatgtaatttacagtgatgtgagaattagaagatatggaatttatatctacttttaagttctcacatatttagataaaactaaaaataatttaagtcaatattggaggtttgggaaatttggggagggtaaaaatatacataacatagaacatgtatggtatgcatataatataaaatgtatcattttgagggtatagttcagtgtcattaagaacattcagattgttgtgctattatcaccactgttcagccaaagaaattttcatcttctaaaactgaaattttacctcctttaaacagtgactccccagtccttgcattccctggtccctggcaaccacattctactttctgtctctatgaatctgattactcaaggtactttatatagtggaatcatacagcatctgtccttttgctactgtttaattacatttagcattaatgtcttcaaggttcattcatgtcttagcatttccttcctttttaaagatgaataatattcattatgtgtatatgccatattttatttaaccattcaatcttagatggacacctgtgttgcttctaccttctggttattgtgaataatgctactatgtgtacacaaatatctgcctgagtccctgctttcaattcttttgggtgtacacctgcaagtaaaattgcggtcatatgataatttatatttttctgaggaactcccatactgttttccatagtggctatgccattttacattgttaccagcagtgcaaagaaatgccaatttctccacatcctcgccaacacttgttagtttctgttttgtttttttttttttcataacagccatgctaatgggtgtgaagtggtgtctcattgtagttttgatttgcattttcctaataactactgatactgcacaaccttacatgtgtttattggccatttctatatcttctttggagaaatacctattcaagtcgtttgtccagtttaaatcaggttgttgttgttgttgtttaaatagttgctctgttgtagttctttatatattctggacattaacccattatcagatatgtaataatatgtaaatattgtctcacatgctatatgttgtcttttcactttgttgatagggacttttgatgcataaaagttgattttgatgtagtccagtttatctatttttttcttttgttgcttgtgttcttgtgtcatattcaagaaataattgccaaatttaatgacatgaagcttttccccttggttttcatctaacagttaagttttagctggtatatgtaggtctttgttaaaatttgaatcaatttttgtatgtggtgtaagataaagtcccaacttcattcttttgcttctggatatccagttttttcaacacccttgtggaaagactgtccattctccatttaatggtcttggaacctttgtcaaaaatcatttgacaatatttgtgtggctttatttctgggctctttgttccactggtctagatatctgtctttatataattaccatacttttttgattactgtaactttgtagtaagttttgaaatcagaaactatgagacccccaactttgttcttcttcaagactattttggatatttggagtcttttgaatttctatattaattctaggattttcttttcaatgtctgcaaaaatatcattggaattttaatagagattacattaaatctatagatcactttgggtagtattgacatcttaacaatattagatctttcgacctgtaaacacagaatctttccattttttggtatcttccttaatttctttcagcatacacgtctgttgtccattggttcagtttatttgagtgtcttattctttttggtactattgtaaatggaattgtttcttaattttctttacagattgttctttgttacgtgaaaatataactgatttggggtgttgactttgtatactgtcctgtaactttacttacttcatttgttagtcctaacaggtttttttctttgttattattttttttggtgtgaaatctttaggcttttctacatataaaatcacgtctgtgaaaagagataattttacatcttcctttccaatttgtatgccttttaattttcttttctttcctaattactctggctagaaattccaatactacattcaatagaagtggtaaagtgggcattcttgtcctgtccgtgattttagaggaaaagctttcagtcattcactattgaatgtgatgttgccagcgggtttttatacatggcttttattgtggtgcattcgttatcttctgttctgagtctttgagtgcttcttttcacaaaagggcgttgaagtttgtcatatactttttctgcatcaattgagatgatcatgtgcttttttttcttcattctgttaatttggtttattgcactgattgatttttttatgtcaaactatccttgtttttcaggaacaaaccatactttttcatgctctatggtccttttaatgtgttgctcaattctgtttgatagcatttcattcaggattcttgtatcagtagtcaaaaagatattggtttgtagttttgtcttcttagagtgtctttgtttggtgttggtgtcaggataaacccaacctcatataatgagtttggaagtgttccctcgtcttcaatattttgaagcatctgaggataattggtattaattcttctttaattttttttaaagttttatttttgatggacatgtaattgttatacatacttacacggtaaaatgcagttctatttttatttttttgaggaacagccatactgttttctgttatacctgtactaatttacatttctacctcatcagcggttctcctttctccacatcctcaccagtgtttgttatttttcgtctttttgataattggggtaaggtgatgtcttactgtggttttgatttttcatttccctgatgattagagatgttgagcattttaaaaatatatatttggccattttcatgtcttcttttgagaaatgtatattcaggtcttttgaccaattttaagttggattatttatatttttgatattgagtagttcaagtttcttataaattctggatattaaccccttgtcagatgtataatttgcaaatattttcttccattctgtaggctgtgtcttaactctgctaattgtttcctttgttgtacagaatctttttagtttgatgtaatccaatttgtctatttttgcttttattgcctgtgcttctgaaattttatccaaaaaaatccttccccagaccaatgtcatgtagcatttcccctatattttcttctagtagtttcatagtttcaggtcttacatttaaatgtttaatccatttgagttgtttgttgtataaggtgaaagataggggtctagttttattattctgcctgtgattatccagttttcagagcacaatttattgaagagaattctcctgtgaagccatctgttcctgggctttttcttgtttggaggtttatgattactgattcaatcttcccagtagttacagtttttttttttttttttttttttttttttgtggcttattttctttttcttcctgattcaactttgaaaggttgtacgtttccagaagttttctatttcatctgggttttctatttattggtgtgcattttttttagtattttcttgtaatcctttttatttcattaaaattggttgtaatgtctctttcatcttttggtgctgagtttagttacatgcattttcttcatttattagtcagtataggtaaaaatttatcaattttgttgatttttttcaaagaatcaactcttattttgttgattttttttcctatttcttattccatttatctgtgctctaatctttattattttcttcctttgctagctttggggttagttcatttttctttttccagttccttagagtgtaaacttagattattgatgtgtcatctttcttctttttaatgtaagcatttacatctctaaatttccttctcagcattgcttttattctgttctataattttttttatgtggtcttttaattttcatttaccgcaagatattttctaatttctcttacgatattgtttttctaggacctgttggttgtttaagagtatgttgtttatttccacatatttgtgattttttaagtttttttctgctttagatttatagttttattctattattgagatttttttccctaaactatagagaaaagtgaatatgatcatccttccatcttaacatacagctggctttctattagaaaatactactttttttctaccagcctattgagaagttaagatgtttttaaataatagattcattttttaaacatgtgtcctgaattaatacctatgaatgttcgggttctccacttccacatgccttttctaatcagttatgtattattaatggagactcccactcctgtgtggtgttacacccccatttcagagtcacagagtgacttcctgtagccattgcccaaggcgctggtgaggcagcctgtggattacttatggctcaatcctgagctatgaatttccctttcctttttttctgttttatgcatttctacctttgaaacaggctcctactgacatgtttttatactgacaaaaggctagttgctctgcttccaagtatttaatttgctttctaaaatccaaatatgaatttctctgggagagctttttattagtttttatgacaatgaagtttttcttgattaggcaatttgtgacaagttaattgaatttgtcatgtgcaaagatgaagagcaaattgttacaaactgcaaatgcaattgggctgttaacttcaacatgataaatcatttttgttggtgtaaatgtctaggttcatcttacggtatgcacttttcagatttcacagttcaacaagacccacacactttagtgggtaaaacagttctcacagaggattaaacatttgaagttctttggactttttgaattttataattgcagaaaaatcaagaatattttacttatgaatcaaagagattatcatgtagcaccatggctcctgattcttaaggtctctctgtaattaaatgctttgctgtttatctcccaccaccaaagggaaagcgaatttcacatcactgagcttgtccataggcatcagaaagaatgatcttacacttccttcattttattctttagggagttacgaatgttaggaaatggccttggctgtgaacatgattggcctgagaccagggttaaaaatgaatgtcattaacttaagcatacactttattancgagcagactgcaggtactaaacacaggatttgtgcaagagacaaaacagcccttgtcctagacatgcttcagttccagccactccttgtcctcaccatattaaaagaacctcccccatctccaattttctgtcagggcaatcccccaaacctcccttttttagaaacaccctcctgttcaagatgaccaccatggtgactctccgctctgttcaaagttagcctcctctgtttggcttctgggggctctgcagtgtgacaccccactgtctacctagcactgctgaggccctgtggtcaccacactgggctctggcctagtcccacccatgcccggcttctcctttcacttccctcctctcctagtgttcactgtcctcctcagaaagacccaggtgcacgttgtcatggttttgaaggtgtcgctaaagtcacctcctccaggaagccctccagggcttctgctgctcatgttggtcttgccctccacagaggtactatgcgatcattgttggcattgtggaattgaatactctttccaaagcagatgatattatgaaagaacaatattctctctgagagaatcaaaattcccctgaagctagggatccttcctggagcttctgtgttgcacttccaaatcttacagggctggtcctccattgactaaaaaaataagatacaaatttccaggagtgcattaaggtgttgcccacgttagagtcagctttacaaagtgcaatgagaacagttatgaccttgaatgataatatgggacttttagacaccacacaaagggacatcagtagtctcttctgaaaacttttattctaacatctaattatactgatgagcaaacatgtgtttttagctatagtaaagagaaatgcttatgtaggcagtgatgcctcttttctatcatggtaaatttcactagttttgatagatgggattgatatatggcatatgtgtgtgtgttcctgcttaattaaaggaactaggaactgatcttaatcaagcagaactcattaatagctttgagaataagagccagtgtggccaggtagagcttctttgaatgaacatatgagggctaatttcctaagtggctgttcttatgtgcttgaaagcagtctgttctcataagcagcgaggggaattctgtgcccagtcctcatttgtttagcagatctttcaaagtagctccactatccagtacttagtgtagatatttaaggctgatcatttggatggatcagacagaccatgtctcaaagcatgctggttgtatgagctagggcaaataatgtcaaatttttagcactgacttgagggttcttgtgagagttaaaggagataagggaggccaggcgcagtggctcaagcctgtaatcctagcactttgggagcccgaggcaggtgggtcacgaggtcaggagtttgagaccagcctggccaatatggtgaaaccccatctctactaaaaatacaaaaattagccagtcatggtggtgtgcgcctataatcccagctactcaggaagctgaagcaggagaatcactcaaacctggaaggaggaggatgcagtgagctgagatcatgccactgcactccagcctgagcaacagagccagactttgtctccaaaacaaaacaaacaaaaaacaaagcaaaacaaaacaacaaaaaagagagagataagggagagaaagcacaaggttgtacccaaagcggatgctcagaaagctcagttcctcccttccctctaatgggagctgtgaagagctgacagcaccacgaggggtggcagggagtccacagctccttaatgtcctgaaggaagagtagtggtaggctccatcctttgagctccagcatgccttgtgaaaggggtgctatgaacatgaattaaatatgaatgcagtgataaaacattttattctttttaaggctctgaagagctatacttgtcagaatgatttctgcaccagggaatcatttagattggtcttcaaagagtgaaaatttggaactgagttctataatggccaacatggaatgtaaaattgacatatataagctttgaaagagtaattttcaagagatttttttgactgcatgttctaatacccttaaattatgtctgaacataattgaaagcagattcagataaagtgtaggttttaactttagagggtggaaggtggctgtgcttaatccatgtatcttctgtgtcttaccagcttctgtttaaaagtgtgagggctggggtgatcgtgtttcaggcatgggatcagctgtggatgacagagaccatttctccagtggatgatctcccgtaatgtgatcatagggcagctgccttgaattctgattatgtggaaatgggcaaacttttttttaagaataaaaaatagcatttcccaattatgttatcttggatatagtattctaaatttactccccatcctagaaagtatgaattaatcctagattcctcctcatccaactcaaggggtaagtcacaacatctcacaattccagcacctgaatgctcccagggagcccaccctccccacctcacatttctccgatgactgctacagccctaacctagggggctctctcctgtcgcccccgcctccaggtcactccttttattaaatactgtaacaactcccacttgcctcttctccaagagaagagcctgacgcccaccaggatggatgagatgcttccttacctgaaccaagccccagctctcgccgctccagcccagcatcctgaggagctgcctgactcgtacctgcctataaaaggttccctgttatcttaatgctctgggcctttgcctgggcagccaccctgcttgccgtcctcaagatgcagttatcaataccccaggaagccttttctgagccctggccccacactcccacggttagtctttgagtactcctccatagcatctattgagagctctctttgcatctctctcctagtccatggactctacagattcgtccctaccactgtctccaatgaaatacacatggcctagcacgtggtgggtgccaaatgaaggctcctggacaaacaaaggagcctttctctataagaacagagcttgaggaaactcgtgatagaattgtgaccaagagaagcagttgatgaaaaagtctccaaataaatgctggcaagattctctttccaaatgtgaaaatacacctgtgaaaaaaatcacatgatgtgatttttcttttaagaattagatcagtgtccatttcatattaggtcttccacacaccctgcatacatactctctggacaatgaagcctaatgtataacatgcattaatactgagagaagtcgtgtgaccaactgtttcataacactgactccctaacttatctctgttttcaaacacagagttcacaggacttgtctctagttgtaggactttgtggctacatccaaggcacatgtggtttttcgtttcataaagcgatagatattctgtggcaaatgctcaggtgacttcttgtctttctcccctttcctttggtggtggtgggtgggcaaaggttacttttatttttgtttaaggtaagtaaaggttttcccttctacttgttgatctgcctctccaggggctgtgacaaagtctttgttaggatttgacacccatgcacccatcaaagaaggtggtgcaacagcactttcaaaaatatctttacattttctgaattttcctttgtgctcatttaacttgttattcctaccctatattatttgtaaatattttaaagcataacaacaacaagaatattataattttcttaatcctatttcccagtggcaaccactttcagccttttcagctatttattctgatatttatgcctgtagttcagaataatctgcatatcctgctcttctgatccaactttagacacaaacaatttgtcttcttataaggattgctggggactgtgggttagtcatgccccttttcacacccctcctggtaactacatctaaactggataaacacaaataaaggctttttcttctgaccacgtaaatatggttcactcttgggctgtactataatatatagcccaagtgtaatataacatcctttctcatcaaactctgtttttccttggactaaaaaatgggcacttttttcccaatgttcttggaatgcatcactaaatcttccttcagcctccaaaagtttgtaaaatatgtctccacagagttctttacacatgagttctgcatgcggattatccttccctcttttaagcctgtcctgcttcctgtgcacttggagtgcccccctggatgccttcatctggacacctttcttcaccctgaagtgttggacgtcctttgtgccaatcccaggctttcgtcatcttttgttatgttccattgtagggtggaaaattattatccctcaggattctgaaggcataattccattgtcttttggttttgcctgttgtgagtcctatatcattctgaataattatccattgtcctgtttttcttctctctggaggctttgggaacttttcttaattcctggtgttccaaaattttattacaatgtggatagaaatgtttttttctcattcattttcttgagcattttaggagcttttttctgtcttgggtactgtataactcagggttctccagagaggaagacccaacaggggatgggtggataggtgatagatagatagatagacagacagacagacagacagagaggtatatgagaactggacagacagacagagagagaggtgtatgagaactggttcacaggattatggaggctgaaaagtcccatgatgagctgcctgcaagctggaggactggggaggcccggagcatggctcagtccaagcctgaaggccttagacccagggaagctgatgatgttactctcagtccaaggccgcaggcttgagaaactgcggctggtttggggggtgcagagaggggatggtgcaagtcctggagtccacaggccagagaacctggcattctaatgttcagctgtaagaaaaggagcttcaggagagagagagagagaatttgcttttcctctgcctttttgttctatctgggccctcagcagaatggatggtgcctgcccacatcaggtgatggggatcatcctttctccattcactgattcaaatgccaatttctttcagaaacaccctcacaaacacactcagaaggaatgctttcccagctatctgggcatcagtaatccaatcaagttgacacctaaaattaactctcacaggtacttactttttctgaaattttttcccagaaattctatatctgaatttttaaacattatttgtgatactataaaacatatatttggtctgtgaccctgtttcctggcatacaactccccaaatccttagaatctcccaagaaatgtgttttgtatgctaatgagctgactgatggctggcagtccctaggtaggtttaggatggggccagtgaccagaaagatcaaggcaggatcaaggggttgagacttttagccccacccccaaccactggggagcagaaagagactgaagattaagctgatcaccaatggccaatggtttaatcaatcatacccacatagtgaagtttccataaaaacccaaaaggattgggttcagagagcttccggacaggtgaggatgagcagggccccggaggcaggtgccagggagggctcggaagctccacttcctcccacaggccttgccctgtgcatcactttatctggatattttgcaatatcctttataataaaccagtaaaggtaagtttcactgagttctgtgagatgttctagnacattaaccaaacacaaatagggggttgtgggactcctaacttgaagctggctgagggcctggacttgtgactggtggcaagtgcggggcagtcttggagactgagccctcaacccgtgagggctgacgctatctccaggtggacagtgtcataattgaattagaggacacccagctggtgtccattgtgggttgcttgcttgcttgttgatggggagaaatccctacacgtttgggcacagaagtcttctgtgttcattgttgttgtggagttagagaatatcaaaagaaatttgagtttgagtgtttttaatctcagtatttaattgatagtttatcattttattcccattttcccctcctttttagaactgacatgaactgggattggaccatcagctaatattctgtttattagtcctttaggtttttttaaattttattttaccttctggggaatttccccaactttaatttacaaatttctattgaactttaataatatttcttattatatacattctaagacttattttcttgttctctgattgttccttcataatagtatcttattcttgttttatgtatgcattgactttcatctttttgagaatattaattgtagttattttaatattttcttctgcgctgtatgttgtttattcatctattgattttgttgtctgtttcatggttctgattctctgatttttgacatctcatttatatttaagagtgagggactgaaaacggttaaaatgtttgtgtgtgagagagagctttactgtaaggttagctgtcgtccttcatattttctcgcggtagagtccaaaattgtcagcctttgtgtggttgctttttttgttattgttgttctgtggttccctatacagaaaagtgggttcagatgccctgccttagaggtagtgttttgggtggaatagtggtggatagaagcttagcttttgacattagcctttgtgattgtgggagaatagattattattcctgtaaaaagccctagttcactgagaagcagccctcacacaccataagaattagaccgctttgtctagttatttgctttgatctgaaaagacagtaagatatctcttatttccacaaaaaggaccaaattgttacagcccagactagatcctaggttaagctccaaggtgcaaggaagattggagtgtctgtttttctaggtattcatatttcaaggaggaaggaactggaaacattagacatatttctagggctctctggttcctgcgagattttattcacacatcaaaagattggatttaggactcaggtctattgcatcttctaggagactccttcaggagatgcaaaggaaagctgccctcttcctattcataagcaaagaaaaatcaattttccttgtcctgcacctctgaggtgtccagctactcatgtaggacaaatggcttggtgtcactctagggataaggtctatggcaaagagggagggtagtggcagttaacaaacttcttatttaccataaagtatttaataaaaaatatgtctctctgatcctgctcatcctgaacaatatgtgtgcaccattcaggatacagtgaatgaagacccgactgaaaacctagcaataggactacagaggaattagtctgtttttctcttttggggacgtgtttttgatgatgcactgcctttcctggacttgttggccgtttctgctgtgtgctcacccatctctcatctgtctttgccattgctttctgtcttcatgtattttaatgggttttaaatatttctagttttatttcagtttataatcctttttcttttctttgatattttttgagaaaagaattgagtggaaaagtttttacacattcaccttgattttaaaagtatttcagatgtcctctttttaatttgaatttacattcagtatttcacaatttataatttcataatggaactctagtttaactcattatataaaatctgtataatttttccatttttcattgataacttattcattcattatattttggtctgataactactctgtttaagagtagaacaatgtattagtccgttttcacgctgctgataaagacatatccaagactggggatttacaaactgaagaggtttaattggacttacagttccacgtggctgggtaagcctcacaatcatggcagaaggcaaggaggatcgagtcccatcttacatggatggcagttggcaaagagagaaatgatgaggaagacgcaaaagtggaaacccctgatcaaaccatgagatctcgtgagacttattcactaccatgaaaacagtatggggaaaaccaccctcatgattcaattatctcctaccaggtccctcccacaacatgtgggaattgtgggaatacaattcaagatgagatttgggtggggacacagagccaaaccatggacacttcaaatgagtttaccgtgcatgacttttccccttggtcaaatttaaatggcagtgttttgggcaagtcagtcttccctacacacaagtgtgctttatcacttcactttatcccttcatgttgacaggggttactgaggatttgtttgtttgtttgcttggttttttttttttgagacagggttttgtctgttgcccagactggagtgcagtggtgtaaccatggctcctcaagtgacgctcctacctcagccttcccagtagctggggggactacaggcgtgagctaccacatctggctaatttttgtagtatttgtagagataaggttttgccatgttgccaaggctggtctcaaactcctgggctcaagtgagctgcctgcctcagcctcccaaaatgctaagattacaagcatgagctgctgcagctgataagattatttggatttatttatgtatttatttatttattttacagtcagtgtctcactctgtctcactgcactgaagtgcagtagcataatcatagctcaccacagccttgatcttctgggctcaagtgatcctcccacttcagcctcccaagtagctgggactacaggcatgtgccaccacgcctggataatttttaaattttttgtagggatgggggtctcgctgtgttgtgtaggctggtctagaactcttggactcaagcaatattcctgccttagcctctctaagcactgggataacaggtgtgagctaccatatctggctgggtttcttataagaagaagcaacaagagagtgtagtgcaaccctgccttaaatagtagatttgtctcagcagtgtttgtcagttattctcacaggttgacatttatttgatttatcaaatgaaaattttaccaaagaatctttcatgctagcagagaaaagcaaatcaagtcatacattctcaataaatggaaaagcccaggtgacaggatgatatttcacaacaacatttgagatgatgccgtggaaagctgcgagtgtatcctttctatagacttgaaaagtgactaacattctgctaaagctggaaggatgttttggggtgagcgaccataacaataatgtaaaatgttatatgattcactttgaaatgaccctttctaaagtaacaacttggattgctaaccagcattgggttcttttaaaaaactgatttggatgtttatgtgtccctctctcaatcaattcataaatttgttgaccgtgaggtttggtgtgatgaagataaatacaccttcgtagtgtagagaaataactagaaaacgggaaatttatttctcaaataaaagataaggcaatattttgttactttttggaagacattttaacacaacccagattgccattaacaagccttatgaaatattaagaaccctaacagttggtaagaagaatagtagagtcaggacccccataattaagatactcctccaaaaaagcaataacaatgctgacaattggcaaatcatcctttcaaaaatatgcaattaactaaaggcttgcaataatctaagtagcatttattcaagtaaaatatctcagtcttgggaagaacactgactgtgtggcatcttaacttgcttcactttcatgaccccctccccagctctgagatatccttgaaaaccagcagcccacagatcatgctgaaaatcagcagcctggtagcccctggaagaggcagcatgggtttgtagttcccctaaagcaacattcttagagtattgtcattattcaaactgtctggtagttctcaggaaaccaccattcaaagggcatgtctttatttgacctaaatcagagctctcccagtagaaatagtcttttcttcggagtacttgttgaaaactatttgtcacaacacctgcctgagatggcaatacaagttgggggagagaaagctcaccaaaaaattcaaaggaaaagctaaggagtgagatgtgcataagaggcctttgaaaagatggaacatattcctggaaatccagaagttcacatatatggcatatgtgcagggctttgggcatgcccagtgtcatatgcatacccagaaaatacctaagaaggccctgtgctctcacttatgactgaccttggaatgctaagtgaatgttaataaagaattgtaacatatctacgtgagaattgaaggtgtattcccaaaaaggacacacagagcaacttggcaaaggctgggagatttattacttctaggcatttaagaaaatttctgcccaaccactaacttagctaagatgtcaatagccacagataacaaagaatacagcctttacagaattagttcagaaaagctattaacaaacaaacaaacaaatacagcaacaagaaacaggaacaacaaactctgggagaaaaaggaatttgatatcacaagatttgccacattatgttacttgaaatgttctgtttccaaccaacattgtgagacaaaccaaggaaaaataaggaatgaaccatatacagggaaaaataaggaatgaaccatatacagggaaaaaaccgtcaatagaaactgtccatgaggaagttcagtcattggacttcttagacaaggactttaaatcagctaccttaagaacattctacaaactaagaaaaccatgtataaagaactaaaaagaagtaagaaagacatctcaccaaatggagattgtaaaaaaaaaatagagcatataaaaatgaatcaaaataaaattctagagttgaaacataccatatttgaagtgaaaaattcactaaaggtactcaacagcagatgtgaagtgtgtgaagtgacagaagagagcatcagttaacataaagttaggttgattgagattatccagtctcagcaacataaattttaaaaatgaagaaaagtcaacagtctcagagacctattactctctatttactctactaggcatatatacatatatctatctctatctatctatctatctatctatctatctatctatctatctatctatctatctatctattgtgccagaaggagaggtgagaaagagaattaatatttgaaaaaataatgaccaaaatcttcaaacttgatgaaaaccatttattttcatatcaagtaatctcaatggactctcaataggaaaaactcagagattcatgctggatacagtttaatcaatctgacaaaagccaaggagaaaaaatcttgaaagcaacaaagagaagcagctcatcatgtacaagggatcctcagtaagcttaacagttaatttctcctgaaaacacatagatgttagaaagtgtggaaaaatagactcaaagtgttagaaaaaaaagactgtcacataagaattctatatccaacaaagtgatccttcaaaaatgaagaagttagacatcccaaataaaaaagaaaaaacagaaaacgtatcactagcagacttgcctgcaagaaatactaaagagggactataggacttaaatgaaaaaacaccaaacagtaactcaaatctacgttaagaaataacctgccaggcacggtggctcaaacctgtaatcccagcactttgggaggccaaggtggatggatcatcaggttaggagattgagaccagcctggctaacacgttgaaaccctgtctctactaaaataaatacaaaaagttagccaggtttgatggccggtgcctgtagtcccaactactcaggaggctgaggcaggagaatggcttgaacctgggatgcggagcttgcagtgagctgagattgtgccactgcactccagcctgcgtgacacggtgagactctgtctcaaaaacaacaacaacaacaacaaaaactagtaaagatagctaaaaaggtaaatacaattcctccctcaatatttttatttgttttattttttctcctatcaaaattaaaaagcagctgcataaagcaacaattatattctctgttgatggacatcataatataaaatggttgagttggtatgataatagcacaaaagtgaagagggatggaactatataagtgcaaaatttttgaatattgttaaaattaagttggttatgcgagctagcttattgtaaattaagatgttatttgtaattcctagggtagcaactaagaaaataactaaaaaataatgtagtaaaagaaaggacaaggggattaaagtgatgcactataaaatattcatttaacacaaaagaaggcaaaagtaaaggaatagaacaaaaaagacataatatataataaatagcaaaatgcagatataaattctaccttattcataattacattaaatgtaaatagtttaaatattgcagtcaaaaggcagagattggcagaacggcttttaaaaaatatgacccatatatatgttgcttatgagagacagtttcagttcaaagacacaagtaagttgtaaatgaaaggacagaagtaagatataccatgacaagagtactaaaagagagctggggttgctatattaatcttggacaaagtagactttaacactataggaggcaaaaaagatacacatttatcttatatgtgtatataatattaatgtatataatgataaatgagtcaattcatcaagaacacataataaatataaacatataagcacctaaacaagagagccttaaaatatatgaagcaaaaattgacagaattggaggtagaaatacataatgctaaaatagtggttggcttgttcaataccccactttcagtaatagtaagaacaagtagacagaagattaacaaggacatagaatatttgaacaacactctaagacaactagacctaacagacatctgtacaacccaatgacagtggaatacatattcttttcaagtgtattgtaattctcctttattctctgggtgagtgggggacacaattgtgtattatgccattaaataagttttaagaaatttgaaataattgaaatcataccaagtgtatttcccattcaaaatggaatgaaatgggaaatcaacaacagaaagaaatttggagaattcacaaatatatgaaaattaaccaatatacaccaaaataaaaagtgggtcaaataagaaaccataaggaaattagaaaacactttgaaatttaaaaatgcagaaacacagtattctagaacttatgagatgctgcaacagcagtgcttcataaatagatagctgcagttgactatttttaaaaagtgagatttcaaataaataactttacctttcccctaagcaactagaaaaagaagaggacaataatccaaagcaagcagaaaaaagaaataataaaaattacatgagaaacaaatgaaaaaagaatagaaagcaataaaaatttaacaaaaccaaaagttgtttttttgaaaagatcaacaaaattgacaaactcttagctacactgatcaagagaaaaagagtagacgcacattacttaattagggaatgaaagaggagacactactactgacttcatggggtgggggaagaattacaaaagaatactttgattattagattataatctataatatttagattattacctaaattagttgcagtgaatttattaaacttaattagatgcaataaattcctagaaagacacaaactaccaaaactgaatcaagaaaaagtaaaatctaaaaagcctcataacataaaaaaagaggtttattttagtaaccagaagccttaccatcgagtaaagtgtagacctaaatggctttgctggagaattttaccaaaccttttaacaaggcttaacactattctttgacaagcttttcctaaaaattgaagagaaaggaatgcttccaagctcattctatgaggccaatattatcctgatctccaagccaaagacatcacaggaaatgaaaactacaaatcaacacctcatacaaatatacaaatactgttgcaaagattctcaacaaaatactagcaatctgaatccagcaacatataatatgattatacaccagtgaccaagtagtatctaaaaaatgcaaggatggttcaacataaaaaaatcattctatgtaatactctgtattcatagaataggcacaaaaataacagaatcatctctatgggcagaaaaaatcatttgacaaaattacgcattcttccatgatgtaaacatccaacatactaagaaaagaaggtagctttcttaacccaataaatgtaacctatgaaaaatccgcaactaatatcatacttaataataaaagtctaaaagtgtccatcttaagatcaggaacaaggtaagaatgttgctctcaccatttctactcacaattttattggaggttctacctagtgcaggcatctattaataattaaaatgataaaagtcgtatttttggaaagaaggaagtaaaactgtatttgcagatgacatgctcttgcatataaaaaattaagagcgtctgccccctccaaaagacattaaaataatgaatgagttcaacaagttgtaggatacaaaatcaatataaacagaacatattgaattttatacattcgcagtgaacactgaaaattaagagaataatttcatttatagtaatatcaaaaatgttaaaatattcaggaataaatttaacaaaataagtataagacttgtatactaggaactaaaatattcttaaaagaaattaacaatctaaataaatggaaagacagctcatgttcatggattggaagacttaacattgtgaagatggtaatagctccaaattgatctagattcagtagaatccctgtcaaaatctcagcctccttttttttgcagaaattgacaagctattccaaaaatgtgtatggaaattgcaagcaatccagaatagcaaaaaacaatcttgcagaagaacaaagttggaggattgacaatttgcattttctgaatctactgcaaaactactgcagtcaagacaatgtgatactagtataacgataggcatatgcataaatggaatagaattgaacatccagaaataaactcttacatttatggttgtatcacatctcagattctctcgtagaacctccggaaggagcacaatcctgccaaaaccttgatttttgacaagggctaaagataatttactggggaaaaatagtctggcttccctctaggcttcagtttcatttgaaacaaggataagcaccatccggacagcacctacctgagaagctagccataaatactcaaaaggataaagttttaagcacttggtttagaatttaacatataatactaagcagacatttattactactgtgtgatcttgggcaagtaggttaatctctgattttcagatttactgtgtgtaaaataagtgtaatatctttcttacaagagtaacctgagataacgttagaaactcaattaactaccccttactcctccttcctgaaggtgtccagaggtgatacaaccatcatttagatgtttcttttgggaataggaagggttgaccttctttctttcctttttatcacatttattttttattctgattataaaagtgatatatttttaaatacagaggaaaaaatgtgaacctgtttacaccaaaccattaaagtcagtttcctctggggagtgggagtggcaaatgggtgttttcattttgaaccttattgtgcttgtgtaatgtttgaatattttacaaccaagtattactttagaattaaaaaatgcatgtatactataaaacagtattaacatatctttattttatttagttcagcgtttctcaaaatgtattccgtaggcaatagttaacaagatgtttccatgaaaaaaatgtgaaggtgggctggccgggttccattgtcaaataattttggaaatgctattaaaacacgtttgttcttctctagagcactcacaacaacttctatcaactacgttgatcccaatgaaaatacaaaatgatttcactactaacccttgccattttccatgtaactcctactcactcatcagaaggcactttgtgaattacctgtgcactttgccattagtgagtacctcacacaactcgttactggcagagtgcagatgagggacctgagttttccagcctgactacttacagcccgctcttctgactctgtaagtgcaacctttagtagcagggggttgggaaaggaacaggcacttcagagaagagagaatttggtcaagctgctgaattgactgtgagttttcagagggaggagttcagcagggatttttactggctgctcaggtaatgatgaagaaatcctgcacaacatctcatttccaaatttactgatttttcccaagatagctgagatgggttttttaaaattaaacattttattttgggatagctgtagctttatatacagaagcaaaaaataatacagggattcctctgtagcctttacccactgtctctcaataatgacatcttgcaaaactatactacagtatcacaactaggatgttgacattggtaaagatagatagatcctgttcactgcaggatctgtcatgttgcccttttatgaccacacacatttccctcatgctctcactccctacttaactcctggcaacgactaatctgtcctccatttttataattttgttaattaaagaatatgacacaaagggaatcacacagactgctaccttttgggactgtttttttttttttaatcaacatctttctctggagattgatccaggttattgtgaatatcaatagatggttactttttattgcgagtagtattccgtagtatgctgggcagaataagagcctacctaaagatgttcattatctgatcatcagaacctgtgaatgtcttgtgttatgtggaaaaaaagactttgaaggtgtgatttggttaagaatcttgagatggaaacattaccctgaatttcttggttgacccaacgtatcacaaggatctttatcagggaaagagagtaaagggagagtcagaaaaataaatgtgaaaaggaaagcagaggccagagtgattctgtgttagattaactcaacccaaatggaagaaggagaccctgactcaaggactgcaggaggcctctgaaaccagaaaaggcaaggaaactgattttcccctagcgcctccagaaggagcactgtctggacaacaccttggttgaagccccttttggccttctgttgagttctgagaacactttatctattctaggtacctagtcctttgttggatatgtggtttgcaaatattttactccagtctgtagcttgtgttgacatcctcttagcaaagtttttcatacagcaaattttttaattttgatgaagtctaacctgacaactgatctttttatgggtcatgcttttagagaagtagacctttttttataggtctaaattgcaaatattttcttccttagttttcctaaaggttttatagtttcattaattctgtgatacattttgaattactttttgatataggtcaaggttagttaatctttttaaaaataaatgtccaatttttccagcacaatttgctgaaaagactatgtttcctccatgaaatcccttttacactttggtcaaaaatgagttggccatatatttggggatggaggtctttctgggttctctattctgttttatttatctattgttttcctccaccagtaccaaaaggttttgtttaccatagttattaaaaattcttgaattaggtaaattcattcttccaactttactttttaaaaattttaaaaaattggttttgctattcctgttcttttgcatctccatatgcactttagcataatcttctctgtttctacagaaatcttgctggaattttgatagaatttttattaaacctgtctgtcaatttgtagagaattcatatctgtattatgctgagttgttgaagtcataaaaaccatctgtctttcagtgattttagatcttctttgatttctcatcagtattaaatgtcttttcatatcttttgtcccttttctaattggattttttacaacatgaaaaataattttgttctttgcatatttcagatatgatttccttaagtgcttttcagcaattatttgacaccagtggagcatcctacaattcaatttttcttgtatagttttacatttaaatctatgatccttttcgagttaatttttttttttttttttgagatggagtctcgctctgtcgcccaggctggagtgcagtggcgcgatctcggctcactgcaagctccgcctcccgggttcacgccgttctcctgcctcagcctcctgagtagctgggaccacaggcacccgccaccactcccggctaattttttgtatttttagtagagacggggtttcacagagttagaccaggatggtctcgatctcctgaccttgtgatccgcccgcctcggcctcccaaagtgctgggattacaggcgtgagccacggcgcctggcctgagttagtttttgtataagatctcaggtgtaagtcaaggttcacatttttgcttatgaatatctcattatttcagatggttattgagattatctttttttcattgagttgtctttgcatctttataaaaaaccacttagctctttttgtgtaggcagtttctaggttctctattctgttccattgatctatgtgtgtatccctctgacaatatcacacaatgttggttactgtagctatacaataggctgtaatatctggtagagtgattcttcctgcactcttctttttcagcattgttttaggtactttgcttttacctataagttttagaataattgtagctctatatatgaaatatttttaaataatttttatacaattcgtgttaaacttacacattagtttggaaagacatctttacgatgtttaatcttctaatccatgaacatggaatatctttttatttagatcttctttgatttctttcatgagcattttgtaattttcaacatatatcttctcaacgtatatattttttctgtttcctggcttctttcagtattttctcttattctttggtgttctgaagtttacttatgttacccatctgttctagtgtgttgtgtacttatttagagtcccttatattaattgtagctattttaaattctctgataattccaaaatctgtgtcatatctgaatcattctactccgatgtttgctttctctcttcagattgtgttttttcttgccttttgacatcacttgtaaattttagatgaaaggaagacatgatacatcagtaacaggaagtgaggtaaataggccatttgtgtgaggctttatgttaaccttactaggagttgggctgtgcttagtatttgttgcagtatatgtaacaggaactccaaattctttatttttgcctccccttcctgtcttttggcttccttaagaatccctccttgtatagaatctgcaccttgaggtctttcagctgtaaactaatgttatttattatagtggagccctgttgatatgtggcatggtgtagcaagaggggaaatttatattatcttatgatcaaatctgtcttttagtagccctgtatcttcaggctgactaaattttggtcaagcagagaatctttttcagtgccttttatttctttcttttgccttcttacactggctagatcttctagtactgtgatgaatgagagttgagagtgggcatccctgaattgctactgagctcaaggggggaaatattcagtaactcaccattacctgcaatgtttactctatgttgtagatgtttatcaagttgaggaagttctcctctgttcagtttgctgagaggttttactaagaatgggtgttgcattttgtttgatacttgctctgcattgtgacttatccaatcatgttatttttcttcttgagcctgttaatgtggaagattatattgattgatttttgaatattgcatcagccaggaatccttggaataaaccccgtgtggtcattgtatataattatttttatatgttcctgaattctgtttgttaatatgtatctttaaggtttatgcacatatattcatgaggaatattggtttatacttttttttgtccttgtctctattattttgatatcaggatgatggggcttcataaaattaattaaatttagcaacgttccttccttatctattttctggaagagattgtatataatttgtattatatttttaatatttggtagaattctcctgtaattgacatgctttctgtcaatttttgagtactttttcatccttactgtctttccattcttcctggacttccatgacacaaatactagatcttttgtctgactggtctctgaggctctgtttattttttcagtctgttttcttgctggtttttcagattgtgcagtttctattgttttatattaagttccactgattctttcctctttcctcaattctgctgctgaatgcaccagtgaaggcttttaaaaattatttttgtcatcaaattttttagtgctaagattttcactggggtcttctttatgtcttctactgagagtttgtttctttgctgagcctttttattttttcatttgtctcaagcatattagtaattgcttgttgaaacatttttgtgatggctgcttttatcttttattattttttaaaatctttgccacataattttaacatctttgccttcttggtatagatgtcaactgattatcttttttccttcagtttgagaactttctggttcttggtagaatgggctgagtgtttttcagttgaaaactgaacatttcagatattattttatgcaacagtctatcttatttaagctgtctgttttggcgttctgcaacagcactctggtggaaagggagttggagttcatcacttccaggttgctacagaagtccagtttccgtccttgggtttatttattgggtttatttacccttggaggctgtctcctaatcattgctggatagggagggagttctagcttccctctaggtccctgcagatagtgtgctggctggacgggtacaagtacctgcttccacgtggtctccaactatatcattaggagaggaagctcattactgtttagaggaaatcaaacgcctgtctccctcgtcagcactctctgaaaccaccttagttgagggatggatgccttattgtagcccagtaagggtagaattcagggctccttactcagcctttgtgagcgaagccaagtccaccattttatctattctgtttggctagaaaagagtggttattgtttaaaagtattctgtcgtggccaggcacagtggctcatgcctgtgatcccagcacttcgggaggctgaggcaggcggatcatgaggtcaagagatcgagaccatcctggctaacacggtgaaaccctgtctctactaaaaatacaaaaaattagctgggtgtggtggtgggcgccagtagtcccagttacttgggaggctgaggcaggagaatggcatgaacccgggaggtggagcttgcagtgagccgagttcaagccactgcactccagcctgagtgacagagcgacactctgtctcaaaaaaaaaaaaaaaaaaaaaaagaaagaaatagaagtattctgtcttgttaggatgcccctttacttgtcctttaactagagagagctggcttctgttgagaatttttaaaattcccatgcattggtgtgtctgagtttttagcttcttcagttccaaatctggaatgaaacgaaaagcaaagaaagcccaagatactcgctaccatgtcatcccttgggtcctgatgccctaactggtttgccttttgtctaattctcagtcttattatgattgttttacatgtaatatccagggattttagttgcatttagcaagaaaagtagagacaagtatgtctcttccatcttaccaaaatgaaatggatttatattttaaaaaattttcctcagctcactgttttcttgacaagagaaatttttgattttggttgaagatgaatttgttttccagcttttactctgaaggtgatcagcagtcagagttttgttcagcaatagggccatgaacatttggaacttacagatagaattcgatggtgtggagtgttttcctgtcttttacaggcttatttgccaccactgatttctaagcagttcatgctttgaagaaatccacacctgacaagtcatttcttcccatcattttcctgcctgcctgtgacttatgtgtagaatgacattattttctaaaagcagagttgcaggagatgaagactccctcccccagccccaagtccaacagagaaagaatcatatttctgaagtggaagagaagaatatgttattggaaaaattatttgcacttgcaggtagagagtattgcactataaaaaatgaaacacagatgactcgaattcaattgctgcatgtctggaatggaagattgggaacttatatttgggaaaagaaaaagactgaattctttttaaaaattatagtttgcaaactcataagatttatctagcgttaaacaaatccttagggcactggagttttattcccatgtgatagttttccccataatagttggtaatatatgaaatgtaagtttttcaggattcaaatacaggaatcataagctgaagaaaagccagtaatcatttgtcatttgacagcagtggattaaaaataatagacttgaatttctttaggcncttcccgtatttcatatgccccctgttgtctatacccctgcctttcacatattttgttatcaacctgaactttacaaagcatgtgagatacttacccttgtgctcaagtcaatcctgagcttggagagtaggcagacaggttccaactctagtttggccattactacctatgtgacactgggtaagttatcagtctaacctccttacctatacactgagggtaataatataacctgccttagcgatagttcttacgcagacatattgcaatatcaacgcataagtgctcatcatcttaatcattactgtagtgagacatcacaacagacaaggcacaatataagactgtgtgcacagtgtcagaagttctgatgtttgatagcagctccccaaatgtcctgttcatggaggtcccttgctgaatataaatgataacctgcttgttccatgtgcagtcattcatactccatggaatcctgcctcactttcctgaatgaagtgggtggcgttcttacattcttagtcagctcacaagtacttcctgggcatccacttctagtacgcaggctctggcttctggctgttaaacagtgaaccagacnatgagctggctctccgggttttttcctttgctttcttgggtcaggtgaagttttcaggtgggaggaacttcagggatgcaggtggaaggggaaatacagctgcgaggaataagacctgagttgaaagctatttaatacatggaaaatggtctggttgatttagggtaaattacaccaggacagagaaataggaggaagataaaatatacctggatctgtaaattagacactgaaggacattgtgcaacagtggacggacagcatccatggtgggggtggatgtgtcaagtctgtcatttggtgccgagcccctcaattaaaacccatactgatcctgtacctaagagtccatgaagaagtgactgttaaagatgattttcccttattccatgtttatttcaaagtgatttttcatttactctcaaattatacttataaatactgtttacatttgctttatgttaaagattttgtgcaattatagcagtaattaaaaggaattacaataatcatacctgttttcataagatttctatctgagagagacaaattattttatcttcaccatggacctgggatgagtttctttttaaataatgtgccaagggttagaataaactgctatgtagctaagttaaaaatttaataacaaataaatggcattattgtcaaatattaaaaaaggaaaaataaaaccttcactatttccatgataaaccatgtcatgtggggaatacctccttattaggtgaacacatcttacagctgaaatttttcgtatggcaaattaccacctgaatatttatttagagaatggtctctcatttcactctagtttgaaagatgttgtctttaaagccatcatattcctcacccacacacactgcccacctgtttccaccaaagtgctgtacttcatcagccacaggccattgtagtcaggaagtcatgtacagtgttctctccaaaccgctcactttgcttatggcacctacaaaggactttattttttattttctcctccctcttcctccacgccctcctcctccatgttctgctataaaacttatatttatctaagcaatttaatttttatggttaaaagaataagataatactaaaagactcaaaaagaaaaatacaggccgggcatggtggttcacgcctataatcccagcactttggaagtacgaggcaggtgaatcacttgagctcaggagttcaagaccaatctgaccaacatggcaaaaccccatctctactaaaattacaaaatttggccaagtgtgctggtgcgcacctgtaatcccagctactggggagactgaggcatgagaatcgcttgaacctgggaggtggagattgcagtgatccgagattgcgccactgcacttcagcctgggcaatagagtgagactccatcttaaaaaaaaaaaagtgcagctccctccatcctgcctgaacctgggttcattttccattctttaagggatttcttctcttattttccatcatgttcctagtaatatccttatatgaacatttgattattcgttctcagctacattgatgcctcctggaaacgctagactttccctgtcttacactctacccattttccccttttgttcccccgctcaccttccaaaacaatcatgaaccaagatttggtcagatacacattccctgcttacaatgttacagtcatgtaattactgaactttgcagaatgtcctagtgtgacctgcttaccttatggggaggaggtcgcatagattatgtttgtccagaaggcgattaagtccctttaaaagaaaataatgtctgacatccaagcactgtagtgttttgttggcagctgtgatggaagcacacagccctctccatgggttggaaggctttagccaacctccatggccacagactcagattaccctccctcccattcccacagggctgcctgccacagtggcccacctgaacccctcactgtcatactgcaagaccctcctgctctttcctgggtggactccctggttccccaccagatcttcccagtcttggtcattctgcttccttactttggtggagaatattctccaggaatcttctgaggaatgttgcatggaaggtaactttgtgaatgggtagaaaataatttcccctgagagttgtgcaaacatagatccactgcttgtgggtgagttctgggccatctttccttaggtcagtctgattgtgagctgcttcttgccccaaccccctttatcctcagccacaaccagaaaggtcttcccccttttattctggaatttcaaatggtagtatttctgattttcttttcatatgccatggactaggcaagtcttaactatatgtaaagtcatttgattattgagattgtttggtattatttctttgataattcttttattacttttctcttttataagacttctctgtttggttttatgctagtttttgggaaatcccttcaaatttaccttccaactactgatttttttttaatttctgaaggatctttctaatacttaggatgtttcttttttacagcatcctcctgttatttcaatgaaccagtaactttttttttttcttttggaggatcttaaccatagtttctggaagttttcttctggtctcacattgcttctgtttgttttggagtacatcattcatgatagagcatttccctactggcctctcatgaataagtagatatgaagcactcctggctggttggaagttctctatgggcctcatattaggatgaaaactgggaatttcagagaagtactgcttgttagtatttccaggtctttttactttggcttgttaatttcctcagatggaagatttttttttttctattgttgcctgggaagttgcaaacctacagacaaaatgctgggagcctgtcaaggaaaggggctggtgcacccacctgttgtctctgtatgtcactgaatccagggtttctctgagtcagcctccaatcaacagctctgtggctcgggaatcttgagttctctttcttctgttttggacccatcgtatgttactacttagagatacgtggaacctccaactcctgtggtccttcagagtttcccctgtcaaaacctatgatggtctgagatgttaccttacttgaaagctagtaagttggcctgccatagtgtcatggtttctggaagaagacaagagatgcctgggtcagagacaaaggacattgttacactgtaggcattgatgtcacagcaggcattgtgagcttcatgtttgcctctgttctccttgccccccaagttccatgggggcagtgtgaaacagccaaccagtttgtgccacagcagaggaaccctgaacttaggaaacctccatcttttacaatgtctgcatacgtttttaatgatgctttttgatgaagaaaagctcttaaagaagttaaatttgcttgccaatgttttttcttttatgtttagtgtttttgatgtcctatttacaagttatttgcttatttaaaagtcatatacatttgtatttgcttttttcttaaaatttgaatactttagcattttgaatatattagcattcacattttggtctgtaattcacctcaaattaatttttacttgtggtatgaggtaggagttcaaggttcatgtttttctcttcatactgatatctagttgctacaggaacacgtattagaaaaattagtttaaagcatgtgcagaatcttaaagaccaggaaggtgatactgtagttaatacatcacagcttctataaactaaaggatgtgaaacctaatgcagctgccattattgtgtgctaccaaatgacaggctcttcaaaggaaacaaagataaaagatatcctccctgtctttaaggaacttaaaaatatatgcatagaaataaacttacacatacactataattttatttataaaagtgaagggaaaatttatgcaataaaactgataatgattctctaagactgtttacagcttactagtactgaagttgtcccatctgacccaaaatatctggggatgcttaggaaaaaattaaggatataggaagaattgtatattatgacatattgaggaatttcctgggagagagcccaacccaaggacggtgaacttgattcattagcaaagctttggtccacagagttagggatcacgctgagtgtagcatttggtactctgttcactccttgggtacctgagaaggaggtggtaaggggaaagctaaaactgtttcactgaaatcatggtaaggtattgacatggtaaagcagccatacttttggccttcttagatatgggtctgtacaaaaggataaagtgaatatctcctccctgtgccactggccactgtgcagctttggtcctcttgggctagatggaatggtagtggcacttttttgacttggtaggtaggggccagatcgggtgcagtacctggcagtaatggatatcaatggtatccaatggagaaacacgccaaatggaaaagggagtacctagggtttgctagaattggaatagggaaagaaaatgggcatcacaggatgactggccagagactggactgggcctgctccttagcatgtgtgaagcatcttctgatgcccctagatatagctgatgagctgaagaaacattggcaggaggtatgagggttctgcattcacagttgggataagggaccagcagaaaattagcttgcacacataagggtaaggcaacatcattgttttcagaattcaaaacattgaaatcctcttacttatttgatcttagtagcaacccaagggactgcagctgtttttctaaaatgaagagctccacgtgatcacgtggaggttacgagattcacctacaatcttagtaggtgacccagctctggagcctgggctggtggccatcactttcactctacctcttcttgccctcgccagtctcagtgtcccatgtggctgctccctacattacctctcagctcccccgacccacctgcctaccaagcctggtcccagatgaactctgctgaaatacacctctcaccatgtctcatctctactcagtatcctcagagactcctactgccctctaaattaaatctaggctgggcaccgtggctcatgcctgtagttccaacactttggaaaaccaaggagggaggatttcttgagggcaggacttgtgttcagcctgggcaacttagcctcagcctcccaagtagctaggactgcaggcacatgtcactatgcccagctaattttcctatttttttgtatagatagggtcttgctctgttgccctggctccagagtggggtcacctactaagattgtaggcaaatctcataacctccatgtgatcacatggagcatttcattttagaaaaacagctgcaatctcttgggctgttactaggatcaaataggtaataggccgagaccagaagattggttgaacccaggaatttgaggttacagtgagcctacgattgtgccactgcactccagtgagaccctgtctcataaatacataagtcagtgcttctcagcatggtggccatatccacactccattttttatctctcactctctctaattctccagcctgagtgatttcaattttccaaacctcttgagtgtccccaaaacttttgtgaacttatctctcctaatgtaagcatcactgtctaccatgtgcgagtgggcttgcttgtcttaaccattccatgaagtaaacagttctgtgtggcagggaacgtgcaggtcttcttggcatctctcccctgcaggggctgtgagagcctgtgaggggtgccagtgtcgctcagctgcaccttaggagcggaccaattcagttacggggggatggaagaaggaaatgtcagagggacccatgtccatgttcgcaagcaaattttattgtaattacacatagaataaattagaatgtttcacacataaacattccaaaattgttttcccacttttacttggaaaatgctcaaatgtaaagaaaagctgaagaatagtataatagacacctatttactcttcacctagattaattgttatcctttaccacatttactgtctctccaaacacacacacacacacaaacacagcttctcttttgccaatcctttgaaaataagttgcagacattacatgtcagtcctgaatatttcacatgtaccacctaagaatgaaaacattcccccgcatactcacaatacggtaaatcaaagttgtcatttagtatcaaatctacagtccaaaaatactactacccctaatgttactgtaattggtattagcacattagtgttagtattagcacacaagacaaatagtactactgggttctcagttgcagctgaaagatctttcatagctttgatccaggtttgatccaggaatcaaagcttcacccttgacatttttacttgttgtgtctctccaggctcttttgatctagattggcaccctcctattcaatttgatgtatttgtcatgacatttactttcctgaagattccagggcagttatctgttagacgggtaaaatgtcctgcattctgcaatatctgatagctctatgatgatgagatttacgtcgaaccttttgtggctgtaatatcacattggtgaaatcattttagacattaagtatcaagtattgcactgactactgttttgaaaggggatcttctcatcataatctgtacacattcgttagttctttacaaaataaggaagtgatattaatacaggtgggctcctctcagtggaaagtgatgtctctcgtatcaagcgatgttgcttcatgaagtgtttagaaagccagttccaaaagcagatcagtaatcaatcttggataagaacttttttcaaaccattcatataaatgttgtccaagacatttaggatggcaaaagtgcttctgaatatttttactagtgaaatttgaaaaaaatatagaatttagaatttgacataccaaaaactgatggttcttgagatcaaccattcagggctatttagtttcctctcccagataattttctttcctttttgcctgatatgaggcagatggagtagggcttcatgccagagtaccttgttactggtggtatgtttaccgacaattagacttccagcattgggcagtgctggcgaggtcacctaacccagcattccacctccgcccaggcgctgatccccaccaagcacacaatgacctccatgacaaagcctctgtgtcagggcatctttgacaattgaaatgctggaaaattctgtgtgaaaatgtcctcattctttcactggtcaatccaggttctagttcttgtcatgctttatccaccttaaaacccttcaaatatttgaagattgctcttacattctccaaagatgttcttctccagtgttagcatcctgagctccttctgcctttcctcttcaatctcccaagtgcatcatttctgcttgctttctctttaacatgtgtgctctagcattctgtctcccctctcttcctacagttctttcctcacacaataatttaagtctgccatgcacatgtcatgcctgtgaaaaccaatataaactgctggtccttagggagctcaccagtcagtgagaggaggatcaggccagcagaggatgctattgacagtgagatggtacctgtctggggcacctgtcatacctgtcgcaaaggaggaggtggttgctagccctagaggaagaaaaggcaacctcagtattggaggagtggctgttttctaggtaggggtgggcatggcataagtccaagaagtgagagatgtaagaagacatgcaaagctacaaagcaggggagagcaagacaccagacagtgggatggggtgggatgcagcgaaccagcacagtgagccttctgagcctttctcagtggctctgattacgtctttaggcaatgcgaagcttgcagaatgagattcacattagagtgtagtaacagggacagacacaccttttattttagaaggaagttggatggaaaatgcatccatatccatctccatatgagatagtgaactttctcaactaatattcagataatattcagaaataacagaggggaaaagtacaaaaagaagtgtattcttcttttctttgaacaaattttcttatggtatctcagctgattgcaaatagagtatcaccattaattccattttagtattgatttgctcttttaaaaaatcaatttaagaaatgccctaatgtggacaacatcttcttctttgggttttagagtggtttgttattttgtaggaagagtgaaaggtgtttctgtcttcttcttccaagcttgagactcttcaggggagcctctagggtaataaaggtcttgcagggaggccactgcctgcgcccctggcttggcccatgcatgaaggccgtgtgtggaatgatgcctttcagctcccatgactcgcagcccaccccctacaccagcaggcaccagccacacctatgatgttccagcttcccgcaaggaactgggattggggtggcaaagcaaacagctcctgctgtttcctaggaaatgaagacactccacttattattacaaatagattatgcaaataaaatcacaattttacccagtgcagcaaagaaatccattatactgcagggtgcatgtctcaatgcaaagacaaagcactgagttccttagcacgtattttaaagatgataggatgtctcttctggcctgaaacccactcccttgtcacctccgaggacttcatgttgcaacaagactctttattgaaaaccgaagagaaacagagctttattctccctgggtttaactctcctgctcagtgtgacctgcactaattttgctcagctcttctgagtaaatacttctttagctatcagcccctctctccaggccctctcacatagagcaggggctgtcttctcatgcctgtgtccccggctactgcacaccgaaagcttagtctctgtgctttgtgcctgttgcctgggtgaatggttgaagggatgactgcagatagcccatgcccgaggtcccctgggcctcctctgtcatgggccccctgattcttttcctctctttccacatctgctaaagtaagaagtacatttgtcttttgtcctttagagcacttggccatttgaaaattgctttctctccctggacttatctgctgtagctcccgtgagaaaggcagggtggacattgtcatcccatgtagagaaagagcacccaaggtgcaaaaaccaaaattaaaaccaagatgtcctggctgggctcagcttagctgtgctcactgtctgcttcagcactgcctgcatgtggtgggtggctcagagtgaggctattgttcttagttaacagaggctaaaactaatcagattttaaaaataacataaatccctccacatactactagttggagctcaaaaatgagacccctctcaagggcgcccacctggagtgtcccagaggaaagacagcagaggaaacagctgctcctcctctgacgtcctcactccagctaggcctcccagctctgcaggcctcccctctgtcctcaagcctggtgaggtgcacaccgggagaaaagcttccaactgggaagaaagtgactctctctgattgcgctgcatcggctgccagggtccgtagggaaggagtggctgcaccccatggcagtgggggtggaggtgcgatcaaggcgatcactggtactgttaccctgcacagtgtgcaggaacagaggccctggcacctgggactgcagaagaggctccctcgcagtcagatgcccgctaggcgagcagaagtgatggagggacccggcccaaatctcactctaacaccagctgtgtagccataggaaggtgactcaggggaccccccttttctttatgggaaaaacagcacttggtcataaagctgttgtgagtgatctctgagacctttctaaagaagctcagttaaaaaaaaaaaaagggaaaacagacatctcccaatacatggcttgacgtccaaaaccacttgatgtcatgggggagcagctggagttgagaatgtgctcatgcagtgtgagcatttgaaggttgaagctctcattcaatcagattgaagctctcatttttatcatgttgaaactctcattcaatacctaagttccctccaccactccccagcaggcagtcgccccacacatgtctgaacacacaccgtgattaagcaagttcccctgtgaagggcacaacgttcagttgtttaggtaagaagtttctccttctgttttttcttaggactcttgtatcatctgaatgtttgtgacacccccccacccaaaaacagttcacaccataaagcctgtcaacataatgaactatcaatccagagtcagcccatcaacacagtatcgcctaaggtgatgtggtaggaggtgagacctttgggaggtgttaggtcccagtggggagccttcgtgaatgggattatttccctcaaaaagaaacttcagaaagacatcttatcccttccactgtgtggggacacagcaagaagatgtggtctgtgaaccaggaagtgggccctcaccagacaccaaatctgctggtatcttgatcttggacttttcagccttcagagcgatgagaaataaatttctcttgtttgtaagttgcccagtccatattattctgtcatagcagaatgaaaggactgagaaaaccattctagccaagttcttgcagaggaattaagcccaggcctgaggagagagccgtgcagccatgacctaatgtgtttggcagtcaggtccttcttgctctttgttaatgagtctattagaatagatagctgagcacacaataggcatgtgggccaagtactgtgccaaggactgggagtgcaatggtgagcaaaatagacatgggcacttgtctttgtggagcaagacaagtgcagggaagagccactagtctcatattcacagaaaacatacttgtagatattggtcagtgctacagacagatgtcatgaaatgtacaatgggagaatttatctgattagtaaaggcagagtagccttccctggataagtgctgggtgtgttggaacctggaggaatatcatgagttgagcaagtgaattgtacttgggagtggaagagcacttcctggggagggaggaggaataccttgcaaaggtgtgaggctggggaagcaccgcccattggaggaactgattgaaggccagtgagtgaaaggaggggagggacgagaagcatgttggtaggtgggtctggaaaggtaggttagggatagatcatttgggcctggtgagtgccgaaagctatgggaaccatctgaggggaggccgtggtgatggggatgtgatcaaaactgtgctgccgacatttcccatggaggtcacacacaagaggagctgcagtcgatgaccagcaacagcatagcccagcctctttagatagcagccctcccggccactccatctcggcaggctcaggctgccataacagaataccacgggcagggaggcttggacaaaggacatttatttctcacagttcttgaaaactgggaaaatcatactcaaattactgaaagacaaagaaaaaaatccaaaagcagccagaggggaagaaagacattacacagaggaaagggaatgttagtgaaaagatgcttctgctatcacagatactgcagaccaaaaacaatggaaaaacatcctaagtactgatggaagagggagagagagaggaaagaaatcttaccaacaaaaatcctgtatccgggaaaataccttttaaaaataaaggtcagataaagctattttatgattaacaagtgagagaattcatcactagcagaattgcattacaagaaacagtcaaacttcttcagattgaaggaaaattataccttggatggaaacgggagcctactgaaggagtggagagctcagacaaatgcagacatgtgggtaaattttttccattccttcatttctttaaaagatgtttggccatctaaagcaaaaatagttgagtttataacatgggtagaaatgacatatgtgacagcaatagcccagaggacaagagagggaaagtgaaaatatactgttgtaaatcacatagaccatgtaatgtgcacacaagatgttcttttgtaatagatactgataaatatatacatatatgtatatatacatgtgtgtgcatacatatgtatatatattatgaaccctagagccaccattaaaaacaacactgtgaggtaaagcttaagagtcaataagggagataaagtagaaactctaaaatgctcagctgatccaaaagaaaacaagagaagaagacagaacaaaaacagatggaacaaagagaagaaaaagcaggatgaaagacagacagaaacatataagtaattatatcaagtgtgaacagaccaaatgcctcagttaataagttcattccatcagtttcccagtggaggtatcagtgctctcaattattttgagaacatgacagtggaggtgtgttccatggaccatgtgaatcatgtaaagaatgtaacaaataagatgtgggcaagaaatatatgatctcatttttattttcgtagcacttttccttagttgtcctgagtgtttaaaatggaaaggctgatgtaaaaatgtgccaattaccagtgtattatttatgcgtccccaaatagattttgaatctctcatctcaagcaattttcaaattgaaaatatataattactactttcaagtctgtcccttccagattgggcttttagcactcgctcttagctgactcagacgattcatcaggtgacagaaaagcagggagcggggcactgtctggtgctggctgaggatgctggggaccagaggagaggaccagtgtctcacagccatgatgctcaggttcactgctcagcaggggctgggggtggggtgaaagcctgggcatcaaatgtttctgctaaaatatagtctgtacacctagtaggactaataaaacatcaggcttgtagaatccaggcccctagttaagaaatgaattatagctttgaatatctgcatcaaatttttaatcatggaatcctttcactttatttcaccttgtctcttagtagtaaatgaaaattatgtttttatttcccctggcctaccaatgtaaaagctagaaataaaggaacgttgtcgtacatagatgccctcattgagtcactacattgagtcacttggaagttcccaagacatatgccatgctatcacttttctccccaaattgtgtgtgtgtgcatgtctaacatatatatatatatatacatatacagatgtatacacatgtatatatatgtatatgtatatatatatatagagagagagagatgctataccaacaattaggaacataatagaaagaaaaatatattccttttcttgctacctgacaccatagcttttgtctgtttctgtctagtatgtgtatatattcttagagatgttacctaattcttaggccaaccaagatacatatgtgtggtgcctgcttgagccaggcactgcctttctatgtgcagtgaggaactatgaataaaggagattttagcttccaaggtgtctgtcttacctaattttctacgactgtaatagaatatgcagactgggtaatttataaagaaaagctgtctatttggcttttggtttttggaggctggaaagtccaagagcatggtgctggcatctggtgagagtcctcccgaggtggaaggtgtcacatgccgaataagcacgaaagacagaaaaacggggccaaacttactttaatcaggagctcgctcttgtgataactgacctgttccatgatcatggcatgaatccatttgcctgataacctcttaaaagccatgcctcttaataccattacaatgggagttaaatttcaacatgagttttgacaggacattcaacccacagcagtgctcaaaggagaagagtgtatacgtggagcaaaaatgtgatatgacggggctaggacagtgtggacaggtgcatggaaggaagtgttatgataagtgaagctttgcacaggtccttggagtagcccttttgaaatcttggaaggctccttagttcttagtgtgcttgtcacttagtggctttcttggctctagagttcctctggggattgtcaggactgggctctacgctgaccccacccccaactcccgccaccaccctttctttctcccttggctctgagcccttcacttgacgtttgtgaatgggattgtttatcctcaaatttgcatactgcacttttgcaaattaaactcctctgcgacactctgctgcccacttccactggctgttcggcactcagaacatcattacctggtctcctctctcttctagctgcaggaaaagacctggtcatcgcctcctgcagtgtccaggtagttaatacataacggccaacatgcacttgaaaccttagtccacagtgagccagaagtggccactgaatcccttttagtcaagttaaatatgactgcagacccggttacccagggcagatgccttcctgcccttccaggtatccagggttattcttggtattctcaacttttgagaagggcccccactccatagacagcgtcatcgtccaggtctgttcacctggaaggagggagctcattcctctcgggccaactgtgatccaggattaattagtgggtctgagaacagctaccctgagtgaaccacacaaatgaggccgccagcagcaatttgtaccctgcgtcatttgggtggcctgaattccactcattcatctgtgaatgcacttaaacaaacattcctccttcctgcaaacttcactctgggattaggaggtctacatcacatcaaatggttagattcatctcctgtgacagtgcatcttaacactccattctaaaagtctagaatcattttctagctctaaagttgatctgtcaggtcttccttcctgttgtattttacctacctaatttatttcaaaatgttctggatgtgatctactttatagttgcagagaaatgtatgcaattagagtcccgttagcagtacagcaaagaactattgcatcctaacagggctgcagcactgagaaagtaactcaaacttacatacccattatacctcctccttggttaatgattctaagccatctggatatgggttgatttagttttattgagaaagagagagagattctgaacagcattcctcgctccaaaatattttaagagttttcttttcacctgaacctaattataaatatgtatatttggagtacttttcccttaccgtaacacttgtaagaaaattttgttatgaaacatttagaccaggcatggtgcctcatgtctgtaatcccagtgctttgagaggccaaagcaggaggatcactggaaaagagttcaggagaagcctgggcaacagagcaagatactatcgctgccaaaaaaaaaaaaaaaaaaaattaaacattagtgtggcatggtggcttgcacctgtagtaccatcgactcaggaggctgaggcaggagcatcagttgagcccaagaattagaagttacagtgatctgtgatcatgatactgtactccatcctgggcagcagagtgagactgtctctgaaaataaaaaaagaagataaaatgtttaaatacctacaacatcaaagaaaacagtataataaaactctgtttacctatcatctgatttgatagctatcaagatgtttttgcaccttttgatatttttgatggtgaaatattttaatgcaaacccaggcctcttatcattttgctcctacatacttgagaattcattgctaaaaaatacggacttaaaaaaaaacgaatggcaatgttattttactaccaacacaattagcagcatttctctggcatcatgtcttacccagcccatctccaaacaccattgtgtggttgctttgtttaaattagtatcagactgtccagtgcatttggtgatacccacatgtcttttgagacatgtccttgattctcaagcattgatttgttcaaaagatttgtctgcttgctttctcatggtatcatttaacttgttctattccccacattttctgcatttcatatgttgtaactcatcacaggccattttttcctcttttaatagccagaatcctttggtacaaagcagctttccctcatcagttagaactatttggttctcccagaaagcctattgtacaggaaagggaggataaatgctgaaatctctccctttatatttgctgagtgggtagtgccctagttatctccagtgtggaccagtgactgcctctctctctcgtctctctctctctctctctctctctctctctctcactctcacatcttgttgactctcattataaacttgtaggtccttatgttttcaatgcattttaatcagataccatcattactctatatgattctcagattgtcctatctttggctaacggaagcccctgcaagttggctttcatgacttttgacctctccttagtggtccttgggcatcacatgctgtcccagcatttctgtacatttctttaccaagccctagaataggttgatcctctaaaagggactctgcccctctcagaggggaatggcatttagaaaataccatctgacaccttgggcatcggcacatggacacgtgggcattgctgttaggtcgtcacagtttctagaaccttccattgctctgagctaggaaatacatattgtttaaaaccaatcaggaccaagattggcccctaatcctgtgtctctcggccttccaggggaccttcttctggggatggtgggttttgctgttgtgaggtctccctggcatgtgcttcctgtgcacccctcccacccagggcactggctgtctcccttaccccagggcttctgccctgctcgaggaaggtcctacctccacctgcaatgtggagcctgcaggactcccccagccttgtcaccacatgctgtcttattgcccctggtttagggggtatgtgtttgtggacagcctgtggggctcaggtgtcccttgcatcatccacagccctgacaccttggtgctaaccccttgcagggctcactgaagtaagtgctatggccacactgccagtatttgcgggagcagggggtttcctgatacttctttgtttgcttgtttctaaatatatcatccataggttttccaggttatcctgttaatctgtttgacttgcagtaagaatttggaaaaattcagaaacactgcagccaccctgattccattgcccactaataatgtctttaactaaaagcagtctgattagacaagagctagacatgaggctctcacggggacattactggcattcccagtggagacgataaaacaaagcaaatggtaaatggtaggaagcatggcaaatgggcccacagtactccagacatcccttgagattgccctggagagcagatgcctgcattcttttccctgtaccatgcattctgacttttgtgctaagaataatttagttgttgctttaaacattctagttcacctgtaagtgctggttacagtgaaggaaaagagacattgttccttcctctgatcagcctgctgagcctcctcagagaggcctgggcagcaggcctggggcaaattatgcaccagaaaaggcttagagagtcagatcagctactttgctttaaaaaggcatagggcatcaagctgggattctggcctatgtaaacagtatgctgggaaaaaaaaaaaaaagaaagaaaaaagaaaacaagccaaaaatgcattctatagctcacatttgaatgctaatgaaaattaaaccagttcctttttttaactttaagagaccacacagcttttactatgctaatgtgtaatgtgaatttctcaaagagctagccttcagcatttcccatgctaacttaaaccactcatccctttttatgcctttattttaagagttccacctctttctaaatccatgctcccacaaagcactagtgcaagttgagtgctgtaggggctattgtgcttattagcaccaaaacgctgagttcaataaaagtaatagtatttcttttctaaccactcattttctgaaccagtgtttactgaatagcttagtgttgttctaggttatgccaaaggatcttaagcttaggactctactttcaaggagacacaagtgttaatgaatcatgataataaaacatgaggagtaccagcagttatggagtataaggaactgcaagtaaaggcatgagtgatcctgtgctaagaataacagttgtcactttaaacatctctagtgattgactctgccttagaaagtcaggaaggctgcccagaagaggtgaccagaaggtccaagttctagaacttgcatgaaggtcctgggctttgttacccttgccctagccaggcatcacaggacagtagcattgatagaggctggcatgggggcttttgaaggaagtatctagagtcaaaaaagacttagggcatgccatagggtggggagctgagggagctggggatgggcagcccagctacctgcgtttactattatgtgctggaaagagagcttggaaaatgctagagatgagatgctgaactcactgtctaaccacccgacagtttcttgcccactgcatagaaaagccaatacactgagacagcagtgttgcaatagagagaaagagtttaattattgcaaggctatttagtgggaggacaagagatatttttataatcattctccccgagaactcagaggctagggtttttaaggataacttgatgtgcagggggctagagaataggtactgctgatttggtggggatgaagtcacaggagtggcaacactgtctttgtgtgctgagtcaatttcttgggcagcagcttataggactggttgagtcagatccttggtatgagttacaggtccaggggaagtcagttggttgccacaatgcaaaagtctgagaaatatctcaaaaccagtcttaggttttacgatagtgttgttatctaaaggagcaactggggcagctaaaaatcttgtgacctccagctacatgactcttgagtggtaagcaattatagaatagcaagcagcttatcattttactatgcctatattttagcagtattcaagccccatgatcctaactttggccttttgttagtcttacaaaggtggttttagcccccagagggggtcagttttgggaagggactgttatcattcttgcttcaaagttaagttataaactaaattcctctcatagttagtttggcctatgctcaggaatgaacaagggcagttatcttgtgaggttagaagcaagatggagttaactgagtttgatttctcttgctgttataatttttacaaagacaatttcaactgtttgattttaaataaggtagcaaaatagcctcagagactgagtcaaagaaaaccagagctgggcagtggtgaaagcaataaaaacagattttgttttggactattgcagtaagggaaaagaagcctcagaatagaactgggctcaactctggacacagcatgggcaagtaggaatttgtagccaatgagcacagtggtggtcagaggatggaaaaattactaagaagaaacatcaaggggaagggagatcctgcctaaactcacctaacaggactcttgccggaagcagaccagggtgataagacatctcctgggggatggtgggtgggaagctcaatcaggtattgaggggggtcagatacccagatggaggattcttgtcaatactggattgcacagggatgtgcacaggtgggccttgttggggaaaaggttcaggagcctgactaaagtttggtcaagaagagaatttttgtcaactgtatccaagttattaactcttgggctaatggagtattgtgtggaaagagttgatggtttggttgtgtgagtcacacctacctggttgtctgactagtttttgcagttcactagttgtgggatgctccttaacaactgtgatgtgcatttcaatctcttgacaaaaactctgcaaggatgctgaaaagattagcttaaacaaatcctggaaagccatgcttggcatatcacaggttctccaaacgtgataagtattattcactcatttaatacttgctcttggtaaatgaactgtacggggccaaggaagagctttctctttggctctccgaaggtttgctgaaaagtcggttcacaaaaggaaggttaataggagaaaagacatacacatttatttaacatgtatatacaataaccttcagactgaagacccagagacacnggggagattgtctgtttttataattagtttcaacaaaatatggacagttgtgtagaaatatgattaaacaaaaagggtgtgatctaatggtcatagactgagtgggaaaatacagcaaggcatatcggtctagattcttcttgggttctctgaaaacatattcctcttttctgggtatgaggcaggcccctctctagaatgggggtctgatgacctacagtcaaacaaagtagggcagataatgtctttatgggccaggttttacacagatagggcagagggagtggtacgtaatactttttagggtttatggctggctttgtaggaaaacaggttctggtttctatgacctgccttggggaagagggattcttgtttctatggcagcctcagag

SEQ ID NO: 9 - DNA, 125832 bp, Homo sapiens
  modified_base (319)..(319): n is g or a
  modified_base (1773)..(1773): n is c or a
  modified_base (6531)..(6531): n is g or c
  modified_base (7053)..(7053): n is c or t
  modified_base (9459)..(9459): n is c or t
  modified_base (9476)..(9476): n is c or t
  modified_base (10399)..(10399): n is a or t
  modified_base (37646)..(37646): n is g or a
  modified_base (48580)..(48580): n is a or g
  modified_base (48899)..(48899): n is t or c
  modified_base (53344)..(53344): n is c or t
  modified_base (54844)..(54844): n is g or t
  modified_base (64853)..(64853): n is t or c
  modified_base (65601)..(65601): n is a or g
  modified_base (69274)..(69274): n is t or c
  modified_base (69431)..(69431): n is t or c
  modified_base (74432)..(74432): n is a or g
  modified_base (74502)..(74502): n is g or t
  modified_base (79472)..(79472): n is t or c
  modified_base (79527)..(79527): n is t or c
  modified_base (82663)..(82663): n is g or c
  modified_base (86802)..(86802): n is t or c
  modified_base (87205)..(87205): n is g or a
  modified_base (97223)..(97223): n is c or t
  modified_base (109718)..(109718): n is t or c
  modified_base (110606)..(110606): n is a or g
  modified_base (110803)..(110803): n is g or c
  modified_base (111346)..(111346): n is a or g
  modified_base (113316)..(113316): n is a or t
  modified_base (114730)..(114730): n is a or g
  modified_base (114822)..(114822): n is g or c
  modified_base (116449)..(116449): n is a or g
  modified_base (118530)..(118530): n is c or t
  modified_base (118881)..(118881): n is a or g
  modified_base (119398)..(119398): n is c or a
  modified_base (120310)..(120310): n is t or c
  modified_base (120753)..(120753): n is c or t
  modified_base (124233)..(124233): n is t or c
ataaattgtttttatttcttcacctttatggtggggataatatctacttcacagggctgttatgaggttcaactgtattgtgaaatactaataaagcataatgtagtttatgaatacattactccagcagcctgctctattaactatcaatgattaataatttattaagcattctccaagctcctgcctctgtgcctttgctttatgatgcagcagctccttcctcctcaccatctttattcatcaaccctttccatcctttagggaccatactacagtccaagtcattctctccatggtgaaaccccctttgaaaggntctaatcttttgcttaacactgctttcccaaggtatcgcaatattgaataggtttgacactcaaaattatgtcttacataccttacatgcttaatattagacaaagaccttgtttgagtgcctgttaactcacaaacatatattttaattcccttataaaaatacaatggttgtttttacacacattggaactgtgagctttatataatgtgatataaaaaagtatcaaatcagaattataaattttatatagtgtgatatataaaatatatagtaaaacagataaaagaaaaagttgtactttatgagcaaaataatagctatatagtaattatgctagatatttattctgattggaaattagtcttttgctatttgagtttaaaattattcaaatttttcaaaaatgctttacttaaaatagaaacacattgcctttattgtaaaaagatgtttgtggaggcccacagtgctaagaagataaataatgatggaggcaaacttgaaaagagatcagtgtattcatagggaatattcaaaatctacagattgtttctagaatcattgatgtctataaccagagagaaaaatgggtttctcagacctctgtcataatttattatactactttgggtgatgaaggaggtggctgcaaggatagttttcatcagaagtcaactgacacctgaaatccaaatggaaaaatatgtgcttctgaaggtcaaaaaaaccctaagagttcaatctgaaaatagaagtagaatgaccaccagtagaatagatagtagtctgactcaaatcatctctctatgatttatgtgtcattaatcactaagctgatttattctgtatccttaatctagaaactattctccttcctctgcatggtcctaaatctggcccccattacttctcacctggattactaccatgtgggttcctaagtgattttcccatttctgtgtttcccacatccattgtattttccacacttcagctgtaatcatccctctaagacacattgttttgtcactcttttctgagagtctatgaagtaaaacctaaatttctttaaatgatagagaaagctcttgtaatatatcccttgcctgttcacctctccagtcttagaagctctttccacagcccatgccaattctccacatatcccttcttgtccttccaaacatacaaaataaactgaagtttttgaagcttctgaatgtgacctgctatgcaagataaaaagtatattcatacagtcttttaaggagagtttcctgaagcctccacacaaccgttccacttataacccattgcccacaacttagtcacagagccatatatctagctgaaagagaagcaaggaaatatatttattctgactgtccataggtccaagttaaaatcccactgctttggatgaaggggtgaagtagtagtagagaaccacnaacttacagactctacgacagtgctttaactttaaagatttaaagtatcaaattttcttataagatgtcatctgaactaaatatgaatactagggaatcagaagacagtaaatgttagtgtcagaaaatgccttaggaaaaatctaggacccagaataaccacctttaacaatgattattatcaatccatctttgaagatgaattctctacttttactcttgagtgtttgtagaaaagggaaaactcaagacattccatcttatcttgggtttacgtgaatagcttcaggctgtaaaagtaggaaaatctttgcttatttttagtatgccctttttgaactacggcataaataaatactatagttacagctgcaggtaattttacccaagctacaatgttggttattcctccatgtactgaaacctgggagtccagactgtggcctttgaacatgttatttcagtactaagctgctttggaaagagtccaacctaaatggttattaaatctactctacagttccagcatggtggcattaaatgcagtgaggattacagaatcttattcctttcttgactcaaatcaataagtggcgttagacacacacagacacacacacctttctccttgaatccaccagttttggatactgacaaattgtgccagaccagagatattgatgatgtagcagcaagaacctccatagcaatttacaagatttatgagggaggctttaatttaactaactacaagctgctgctatgccccttgccatgttcccttttcaggctcagcaaccccccatgggacagacctagtcttctccttcccaaaccagttcccataatctagatgtttctctatcccatattcatcaaactggcatacccttcatcttattacttcattattctgatgatattccctgattatttccacattctcacctcttcccattttctcctcaatttctcaatctgaaaaatgtcttctatatccagcattccattaaccctgctcatgctaagtgcaccaatgaccttctcattgaaaagcagaatggacactttctagttctcatccaagtaaagctttttcagggcatatggataactctttcttttctaaatactttcttccctggcacaaatgtattctgcttctctttctgctgctctgtgtgctgacagttaaataactcttgcaaacaaaaacatcaaataaataagcccagctattgttgtgagtagcaacatctctgaattggtactcatgcaaaataggtcattatccatggatgatgtaataagtgttgacatgtaagggtgcagtagctcaggactgcttacctcattttgattctatttaacataattgataaaatctttatgtgatatcataacacttaaaaatattttatatgtaattgacagtgttctttagtaactatgaaaaagcccttaattactattataatctaataaagtgattatgtcgatgatatgctctgctattctaaaaaattattttcattactttgaatttatttatataatgctgtgtattttgcataatggatagtttacctatcggttttcctagatagtaaattctttgtaaagacaagaatcacatctttatcttttgtttcacctttgtatttcacattacctatctttttaaaaatgttcttataggtacatagtagctgtgtatatttatggggtgcatgaaatattttgatacaggcatacagtgcataatgatcacatcagagtaacttagtatccatctcctcaagcatttattctttctttatgttataaacattctagttatactcttacagttattttaaaatgtacaataaattattgttgactttagtcaccctgttgtgctatcaaagactatatcttatttatcttatctaactatatttttgtacctattaaccatccccatttccctcctccctcactatccttcccagcctctggtaaccatcattctactatctccaataagttcagttgttttaacttttagctcctataaatgagtgagaacatgggaaacttgtctttctgtgcctggcttatttcagttaacaaaatgtcatccagttcccacatctttatcttgatataatttatagaattctgtatgtagtaggttttcagtaaattatatagaattaaaatgttagacagctttttagagtagaagcaagatttaaaatatcctttacagtagtgaatttcctgttaactacatgatattcatctaaaactgcagtattcattctttggccaacaatattatactacaaattttctaatacctaggagatgcaaatcatagccagatgtggaaatagtatgacttgacttatgattatctagtttatataacaactaagttacataatcatagattcaacagcagtattttatcctagttacaatatatttccagctatgttagcaaataaataagacactcacatctgaatatcaatgaataataagagagcatattagaatcaaacatagcttataaaagagtatgattttagccaagctctgaaactattactgcatgtcctttgcactgcaatgaaaggatgccatttatttctgactatgattaatggggctttttaagtaaccaactttctttgccattcaacaaagattgtgtcctagggttctgtctgattccaattctagtgtcatttgtaaatctaaaaaatcagataatggaaggctggatttgaattataattttgtttttagagttagtccttcaatttgtaaggtaagtgggcatatctataaatttcatcagaaggtgtgtggctccacattctgtaaaagtcatgtcagcaggagaataacaacatggatgcctagtcctgacatgaagcctgacagccagaaatgcagcaatatttagagtatcgtgccaagctgtgaattaagcccagggagaagactatttctatgtgtgggggccgtttttattatttttgcaacactcaagcaaacaaaaaaaatcttagcattattctggtatgatgataaataaaaggagaaaaaagaaaagtaatacgtcaattggtatttttaaaagcattcattttaagtcgaagaacatgttcataggtgtcaaaaaaagatttaaaagaacattgcctcagttaccatcagagcataagcccctgcaacagaataaatgaggcatgaacatatatattaaggaaggtttcatgtcatcacgttacatatgtgtcgaatgggaaacaagagaaagaatgctggggttttggggcggaggatctaggtaagatttgaaaagataattactggcacgcattacaaaaggaaagactaaatggagcaatagatataccagaataattatatagtaattaacatgccctctttcttcctcttcggggaattttttttcatttagataaaaatgaatcctgactgccacagtatttcatttggcaggatatcagataatttatatttcaaatatgatctcatcatcagttccatctgttgatcttaactgagcatcagtaatgtttggaactctgacatgtagaaaacatacctgaaaaaattcaaaatctctgaatctatgagactcacataccaattagaaaactcaacaaatatgccctaatcttccaagtgcggtatactcgttttaaatcttcacttttaatccacccagctctctacccaattccagtatcacaggaagaagaaactacagacagttgctatagaatgagctcaaataagtgttagactttgttaaagaggactagaatattctgtttatgctaaaccataaagtgaaaatataactgactaacaggctctgatcctaaccaatcttagtgtatgggatatttataaattcaaagaatcttttttttattcttctctcacattacaattcaaaaatgagagatggggctgggtgctgtgactcacgcctataatcccagcactttgggaggctgaggcaggtggatcacaaggtcaggagttcaagaccagcctggccaatatggtaaaaccctggctctactaaaaatacaaaaatcagccaggtatggtggcacgcacctgtagtcccagctacttgggaggctgaggcagaagaattgcttgaacccaggaggtggaggttacagtgagccaagattgtgccactgcactccagcctgggcaacagagcaagactgtctgaaaaaaaaaaaaaaaaaaaaagagagatggaaaaaaggcaggacaatcaagacaatattggcctgaagatatattgcatttcctgaagaaatgcaggaattatgagtttacagcttctgccttaacccaggtgcttggaccaggtgccttcccttccacatgcagagagaactagatcaagaacagggtgaagaccattcattttattctctcatggcaggctgtcttcacgtaataaacacccccacctgcatcagtcttgcacgctccttctcaaccttcaagacccaattcaagttgtttctcctctgtggtatttttccttgttccatccagacagctctaaccaagctttcccttgggccaagcctttaccttgagtccggctacacactttttaaaactaagtttctgttgtttatttggtcatcagtctcttactgattaggagtaccagtgcctcacctagtggttattcaactnatccccagtctatatcattcacctgctgagagaggaagagttaaataatgcctctctaatatgcacctgtcctcatcaacaaataaagcaccgagaataatgagtcctcaataaatactgttgtactgtttcttttacatcttctcttccatagttgaaccaaaaatgttgtactaccttgttcaaggggaaagtcaaacagttgttcaaaatgagttccatctagtgagtaaaataacaaaaagggtttatgaaattgctattgactacagatggtggtggatttggtttggggtttgtctcatcaaaaaaatgtctacagcaatgcaatgttctccagtaaagagattttgagagcacaaggtatggtgttgctacttcattcaatcaacattttaagagattttgttgccatgactaaagaaagtaagaataaattattcagaaataaccacacagactttaagtttctaagcattcagtatattttggaacataacagtgttgatataggctcagtanctgcatacatcattaaaggggagtaaaagcatgtttttagtaactttttttttccccaataggatactcgatactccaagctattatggaaaaagcaggacaaaatggttggcatgtcagcgctatatgtgtggaaaattttaatgatgtcagctataggcaacttctagaagaacttgacagaagacaagagaagaagtttgtaatagactgtgagatagagagacttcaaaacatattagaacaggtaagtcctagattttatatttttaacctagaccctatacagaaaaatttaacctttgattgacttgtccccatcaacatcttctcccagcttttaatttggagtgtgaggtttgagagttttcattccatgactatcttcaggaccaaatcacaatcttttatcaccaaggacctttttggttcttaagtctcaatgtatttagaaagctatttctcacatattcttaagacttgaatgagtgaaagactctgtgtgaatcttgaagagctcttggcctccagttttcgaaaatattaatgttgaagattaatcccatctaaaaatagtacaaaaattctaaatttgtgggtgcaccatttttagaggcacacttactttagagaagtgctacatgagaaacagcaacataaattactaaagcaataaaataaaagaaaagtcagtggaatactgtatataatttagtggaatactgtatatagcatgttttctgctaggtattataagtcaatacattactaccccagtggagatggttttcaactctcctcaaaatggaaaagtccttgaataaatgtttcaataaatatttgttgatttgatttgaagcagccaggaaaagattaaactgagctttgccgttgtattaaatgataggaaaatatcatcaaataatggataacatctgcctttccctacccctgcagatcatgataaagctttaaaggctctttggccaaaattgcagtgagtgaatgccatctagtggttttagaaatgcttgctcatattatctacaatacgttagttcagccagacatgggtaatataattttttgttggttagttttttacatatagcttaactgcataattatatgacttgatttccattagtaaacttgccaatttggaggtttatttataggaataactttagtattcaattgtaagaatgaaaaccaaaatatatttcagagattcagctttactatttgcaggcaagggactagatgtcttcagtttccttcctcaactatattagcatttgtaaaagtgaaaagtaaaagaaaacaaacaaacaaaaatgttgtattgctaaagtctaaagaagccagaccataagaggaaataacagagtatttacttcctgtcgtccctttgtagaagaaaaagctaaatatatatatatatatactgaagaaatatatatgttattttgggaaatattaattaaaagcctatacattactcgggcttattcctaagagagtccaaaaaatttttgaagttgtagctattcaatgtatatgaaatttttaaatggttagttacagaatccaagaaaaatctttcttctttcttaagcaatacagccactttacctccgactcccatttccctccctcccactcctgcccctgtattgagagtttgagttgtttgacctgaacaactgaagctttgtaaataactcacgatgaatcccacagagcagccaattctaagaactgcctggattgccaagttcctgtcagagggtgagtaaggctcagaaagaccctccacttagcacctgtgcttaaaagaccaagtctggaggaggcaattgagtgcctaaagcacactgacccatttcagaggcttagctggtttctaagaagaaaattggcacacctgggtgctttggataaactctgaataagccgtaaatgagctcctgctaaagaaactggacatcttatatattttttgtcatattaaagaaattagaaaacttgagtgtctaccttttctattcttcttgccaaattctaaaaggtttcttttctatcatggttgcatggtaataataataataatagtaagagaactttgtccatttaaaatgcctctcaggtataaatctcataaattgcaataaagtctactgcattgtgagaaaataatgtactcttaattgtcctataaaattttcctccaagaaaagctgtgtttttattctgaacatgctgttgttgttgtttactatctgtattttaattccttgtagctctaaatgaaacaactttcaatgttttcttggttttactcttggctcttccacaagagctaatccatactttgtcaggggtttgtacgtgtatcttaagacncctgtgtttcaacatcntttttcataaattaagatagcaaaagaaaacaatttcaaaaaaccaaccaaagcatttttaaaaggtaaaaagttaaatgctaaataatcttgattagaaaaatgcctttgaaaaggtggacttttctcagaagatggtgaaattaatacaatgatgataaagttctagaaggatggacacacttcatattagtaaatttctatggccgggcatggtggctcacgcctgtaatcccagcactttgggaggccgaggcaggtggatcacctgaggtcgggagttcgagaccagcctgacaaacatggagaatccctgtctctactaaaaataaaaaattagccgggtgtggtggcacatgcctgtaatcccagctactcgggaggctgaggcaggagaatcacttaaacccaggaggtggaggttgtggtgagccgagatcgtgccattacactccagcctgggcaacaacagtgaaactccatctcaaaaaaaaaaatttctagaaggatgggcacatttcatattatggtagcatgccatcaataattacttcattgacatcttaatttgtatcaatttgcaaaaacataatagaaatagttcagacaatattctctcaaaatatgttaatggaaaactgtggttatagaagcatttcatcttctatacatgttttccaaattattttatgacatgaactaattcgttcttataaatgtattgctatttaatatagtagctagacatatactcattcaagcatttcaaaatatgagtttaagatcaagtatttgaaaatatggtttaatgtacaccataagaaaaaatggaagaatgtatgtaaatatcacccactgagtcatttaagagagtagaaacatattgaaaccacaaagttagatttattttgttcatatcaacnccaatcaaacaaattggaattttggctctctaaatccaatgagcaatttggtccactcatttgcagaaacaagccttgaaaagaaatctaaaatgagaagtatttttaagtgtttgctgaatttgtgatgaattttttatagaatatttttacttaaattgctatgagtttgaaagatattataaatatcattgtggaccctagctttattcctttcacctaattttcttcctataacaaaaatatcaattattttgtagaacagcttgcaatagcttcatgtagctggaatcaaaagaaccgtttcatatcaaaataagagatttatagtgggagtcttttatttatgatttttacatgtatctattaattttaaattctgaactctattacttgcaaagagtccctatggattctacctaataacgttatcaattgaacattgaagtgtcagactttggttcacatgtttaacctagtagcaaaaaagcaacaacaaatcttatcttaactctttttctggtagccaaagtaattgagcaaaatggcacttaaggctagtggttgctcacacattttactccactgtgataaaaacccaagggtccagcagctagatttgtgtgttcctgttagtgaaaccctattcccatgaactcccaactctgatcctctggaacagaattatcccaatgggtagttggatggtctgcactcatctacctctttctttggtcagttacattatatctcccaaattatgatggttccaacaaaatgaaaatgagtgttttcattctctgagagatggataagaaatctttagttgtttatttttaaaacgtaaatggaatcactaaccacctatgattcttctcgttctcactttaaataaggacagttgagctgagatgatcttgaaaatccttgctgtctctaaaagtcaataatgctgtttgcagtgaagtctttttgatgatttgttttatcctaaagcaatgtataattgtatgcatgggatataccttgaaaagaagcgtgtattaatagtaaaacttcagtcaggtgaccttttctggatatttattcattctacaaacatttgttaagtccccactgtgttgtgtgtgtgtgtttgtgtgtgtgtgtgtgtgacactgcatatgcagtgtgtgtatacatatataatacacatacatatatatacacacatacatatatacgcatatgtgtgtgtgtgtgtgtatatatatatatatatatatatatatatatattcaggtactatgctctgctgaagatacagtgctaagcaaaaccgatacattttctgctatggttagtaactcctgtctggttaactaaggtttaaaccaaaagtatttcctaaaatcctactaaaatatatgatttcttttagaaatacattatgtagaaagtgataaaggatcttacactgccttgggggttttgctatggataccagttattattaaatagatgagatatcaaaggcatttgatagaaaactagaacaatattgatcctagtacacatcatggatgtatttaaggaatctaaccaagtatttatcaggaaaagatagtaaggactgaccttagagtatgaagtaggtatttaacaaaagaatggagaaaaatgtctctacagttgactcacaggtatcttaaactgcttctttatcatgtaccccagatttaattggaacccctttcagcagtattgccactttcattatatgaaagggaatttagtgtcccatcagacacagtgtgaatctcggattactgacaaaaccagtgaccttcccacactgtttgcaaatcaatcaaaaaagcctaaaagccacggctgacctctcagaggcttactgtgaccaaaagaagccaataatcctacctcagggcaagatcaatgagaaagagaggaaaatttctcaaacctaaatgaggccatttgcacataagagatgaaatgtggacatgatcccagttaacttattctaaacccaaggctgcctaccatgtctagtaccatctaagtgagatgttaggactcagaatttttggcaaatggtcaaatgcatggcaatacttagtaaaagcctatttatctagagttttcatttacaaattttcacaactctcaaacatcaggtatcgtacaaatctagaactctgtcagttcccccggactcccaaaaagtctctatattgaataaagcattaaaaggagctgaaggcttaaacagcctgcctctgtatcccataactggttgagtcaatacctaaaaggaaaggaacatttttgttactggctaatggccatgaggtcaattttttgtaccaaagccaaaaagcaaaacaaaacaaaaccctcaaaaacagaagagacagaagaaacaaaaagaagcacaataagaagaggaaagatagctatagttataaggaggaggagtcattacaggagagatctcataattggagataacagctttgattatttgaatcatctatataggattcagtggcatacactctgacagtaggaatgagccaacaactgtaggtgggacagctctgcacttgacacctcatacattcattcaacgtctgcatgccagacattgttccaggcactgcaatgcgtgctgtacaaaggtgagcaactcatggtccttacacaacatttacactcaagctgggaactcagaaacatgcataaataattacaaaataatttgatggcttcagaaacagagatattacaaaaatgtatgaagaatccagaagatggggtaactaagtataatcaaggcagtcccaaatgtttcacagagaaaagaagcatttaaactgaaaatgcactggatctttccagccagagaaaaggggtaagggtattccaagacagaacgaactgtaaaggaaacgagatctgaaaatgctcaaaaggtaatcaagattggtttgaagcaaaagtagaagctgaaacggagcagtagacaaagttgaagctgtaaagattggaggtagcagaaatgtagattccttgcattacaccagtttagttgtctatctttcctattgaaatcttatctccatcagggcggagtctatgtttattgttaccaatacatcccctagtgatgataggggttcaaacaacaattgtcgaataaattggaagtctaaatgagcctcacttgaagacacaggcaggagacacattttgtacgtgtttaagggaagtcttcaattacctgggaggctttcttgtccagaatttcacctgtccaagattatgggacacctacatgtcccagagtttgttgtacaggctgaaaaaagcaagagttttatttccatatattaaagtaacaatgggtgagatgcaacaggaacaaatcaggcactcacagaaattactacagcaaagcagtcatatcagcaatttcccgcactgcagtactggcagagcttgctgctttgcttcattataaagctccttttgcatattgagctttgctcaatcaggatctacaacaaagtaagaagaaactcgaaagatgtgaggttttgctaagaaggtgaattttacttctttaatattactatttagcagaactgattcgaatgtgcaagtcctattatgatgcactaggtttgttgttttcatggaaaacagaaacacctttacagatctgctggactagtgcaaatggaattggtgggggttagaaaggggtgtctaattgtctcctagcaactgttaccatggttgcagccatacctcattttcttataaagtaaaaaataggataaaataaaaggcaaagtgaaggagccaaaggatataagttttttcaaggaagaagaaaaatatgattgtcagaatgcaagtgcttttgtctgggaagaatcatgaattctacgattaggttaggttcaactaaatatgttttagttgatgctgcaagaacacttactggaacaatttctactattgtttttgacagaaacatccaaaacttcagcttcttttacaaagataaaggaaaatctgcttgataattttagaggtataaaatgaagtagtttttctagccttaaatcaaaagcagctgcatacaagtatctactgtggtttagggagaggtaagttatattcctcattaggtagaaaagagaggataacatcataattatttcagtagaattttgcatctactcctcaaatgttttaaatgtttaaaaggcagtgagattaacaaaaaggcagcaaaacattcaacagtacctttgaggacccttttctgagtcttgtaaacatcataaacataactacatttttataaattatacagtatttatattaaacagttcagtaataaagtgtgctctctgccagcaaatgaagtgctacattgttttatccactttgattcagtcagaaaagtaatggaacaaattcatttctaaaccttccctcaagattagccacctaattggacactagttccctgctgatacagattttctccaatctcatatacaacttgtgacaagtttaagattagaaggaaataaagtagtgtaatttttaccaaaataataatgataaggttcacataaccactggtaaagataaaaatgaaagacagtttaagattggatataagaaatttattttccattttttaaagttttttcccagggccatatataccaaagagttctattattcatccaaagtctagacataatttgcttccgtatttgacttaaagttttctttttaaaaccacagaactcatgctggggattatatatatagtgtgcatgtgtgatgaaatatatatattctatatttaatatatattctgtttttataatttattctaattcttttagaaattattctaattttataattaattttgtgttcataatataattatataaatattgtgcagtaacacaagagaaacaaattttcttgtctctgcccaccacattctattattttcctttcttatacctgtaccacaacacttatccatttggtcatttatttaacacacatttatccagtacctactaatttccaagcactgcatataagttacatcaattttagtcgatgctgtgaaggaactctgaatgcaaagaaaaacagaagaacacaatcaaataacgcagcacaatgtggaaaggtacaaaaaaaaaaaagacagaagcaaattattgaaaggggagtttgaattccccaggcagagacgctgggaaagagcattcaaggaagatggcatgtgtgagaacagggtaataggagagagcttcgtgtcctgggaaagaagtgaatgtggatggagcctaaccacagagggtatgagattgccaaggcaaattaaaggcagattatgagtggcctcatgggctttactaggaagttttaaattcatcattgcatcatagatgtcatcggatgtttttaaacatgattgacgtcgtgttttagagccataattccgatgacaacatagagaatgaaccagaaagaaggtagaaagccaagtgactgagcagtgtacctggtgactaaggagtgtagcaaataaacaatgatacttcatctgtagactatattttttatagtcacatttataccagtgtataacttaatttgtttgacatctacttaaatatttattgagtgcctgttataggtcaggccaggcatatcctcggcttaggaaaacccctgcacattgcagtttatattttagtggggaagccacacaataaaggaacaaatatataatgccatatagtgataatgagaaattattaatgtattaaatttgtttattaaatgtctaatttgccaaacaccatttttgttaagattttaagaagtgtaactaatccaagtagggtttttagaaaaataaatttgttttggcaattttaatagtattgctagtcaatatgaataatagcctttaagttttgactggcctgtggacaaatataggcaaaataaactgagcttgctatgcaaaaattacatacccacagcaaataggtcaatctagtttattagggagaggtttttttttgtgttttatttctatagttagacctttgggatttttaaaataatatttataataatatttattttaataatatgggaagtaatcattttaacaaatgtaaatatgtctaactgatttataaagacagggtatctacttacatctgtgtctttatgaatccacttcagaggaagctggttgtctattacatatttgaagtatagcataacaaagcccaaataaactcaaatgtgaaaaaaaaatctgctgaaataaaagcaaagagaatgactttgaagtcatatgactttcagaattaatcacaatttcatgtcaaatataatttaaaacatgcaaatgtaaaaccctgaccaaaaatggtattagctgaagttatttaatattgaagattacttccaaaattatgaactgaacatattttatagtctaattgagtcatttttgtgggtatagattatcaacactgaagggaaataagaaaatgatgctaaagcaacatttatgtttatgctaaagcaacataaagtcagaaatgtatgtgaaagttaaggaaggaggtgagtgaaagataatgctctaggaagaatgtccttaaacaaccttttaaaactgctctacagaactgcataccctagctattgagacttcactgtacattagcatattgaagtctctaaaaattcctatggcaaagaaacctcttaaaccttatttaacctagtgttctttgtaaaattggctgtaaaacactttgaagccacttctttataatttatttgccttgtattcatccaagaaaataaaagaaaacttgatttaagaaaaatgaaagaagaaaggacattcagatgatattatctcaaatataataaagaaaagatatataacagcaaggggctagggtgagaacatcacatattaaaagaagcctcccagagccaatggctcacacagtcctctacactggagaatcacagaatcatagactctcaggttgactggttcttagaagttcatccatcctgtgaacaaaatcttcaccaggtgcttatgaattccacagttgaacaatttcatcttcaacatatttgacgttaaaattcagcaagtattcctccctaatgatatatccctttgaaacattcataacagtatgtgatatttgaagataacttttattcccatcaccaccagccccatcaagttttctttataattcaagaatagatatctactcattgatatgtccaattagagacatctcaagaaattagatatttgactttctggttaaacaaaattaactgtatatactactacttttggaattatcatgttcaaaaagtataccataagatgtaaataccattgaactatactgtgaatagtttaattttttgtatataaatgaactgtaaatttttattttttaatttactgagaattttttcacaggaatatcttagattgaacatggtgtatctttttttatttttttaagttctgggatacatgtgcagaatgtgcaggtttattacataggtatacatgtgccatggtggtttgctgcacccatcaacccgtcatctacattaggtatttcttctaatgctattcctccactagccccccactccctgacaggccccagtgtgtgatgttcccctccctgtgtccctatattctcattgttcaactctcacttatgagggagaacatgcagtgtttggttttctgttcctgtgttagtttgctgagaatgatggtttccagcttcatccatgttcctgcaaaggacatgaactcatccttttatggctgcataatattccatggtatatttgtgccacattttcttaatccagtctaccattgatgggcatttgtgttggttccaagtcttttctattgtgaatagtgctgcaataaacatacgtgtgcatgtgtctttacagtagaatgatttataatcctttgggtatatatacccagtaatgggattgctgggtcaaatggtatttctggttctagatccttgaggaatggccacactgtcttccacaatggttgaactaatttacactccctccaacagtgtaaaattgtttccatttctccacatcctcgccagcatctgctgtttgactttttaatgatcgccattctaactggcatgagatggtatctcattgtggttttgatttgcatttctctaatgaccagtgatcaggagctttttttcatgtttcttggccacaaaaatgtcttcttttgagaagtgtctgttcatatactttgctcactttttgatggggttgtttgtttcttgtaaatttgtttaagttccttgtagattctggatattagccctttgtcagatggatagattgcaaaaattttctcccattctgtaggttgcctgttcactctgatgatagtttcttttgctctgcagaagctttttagtttaattagatcccatttgtcagttttggcttttgttgccattgcttttggtgttttagtcatgaagtctttgcccatgcctatgtcctgaatggtattgcctaggtcttcttctagggttttcatagttttaggtcttatgtttaagtctttaatccatcttgagttaatttttgtataaggtgtacaaaaggggtccagtttcagttttctgcatatggctagccagttttcccagcaccatttatggaataggagatcctttccccattgcttgtttttgtaaggtttgtcaaagatcagatggttgtagatgtatggtgttatttctgaggactctgttctgttccattggtctatatatctgtttaggtaccagtaccatgctgttttgtttaccatagctttgtagtatagttttaagtcaggtagtgtgatgcctctgactttgttctatttgcttaggattgtcttggctatacagcctcttttttcggttccatatgaaatttaaagtagttttttctaacccggtgaagaaagtcagtggtagcttgatggagatagcattgaatctataaattacattgggcggtatggccattttcatgatattgattcttcctatccataagcatggaatgtttttccatttgtttgtgtcctctcttatttcctcgagcagtggtttgtagttctccttgaagaggtccttcatatcccttgcaagttggattcctaggtattttattctctttgtagcaattgtgaatgggcgttcactattgatttggctgtttgtctattattggtgtaaagaaatgcttgtgatttttgcacttgattttgtatcctgagactttgctgaagttgcttaacagcttaaggagattttgggctgagaagatggggttttctaaatatacaatcatgtcatctgcaaatagagacaatttaacttcctctattcctatctgaatacacttcatctctttttcttgcctgattaccctggccagaacttccaataatgtgttgaataggagtggtgagagagggcatccttgtgttttgccagttttcaaagggaatgcttccagcttttgcccattcagtatgatatcgcctgtgcgtttgtcatgaatagctcttattattttgagatacgttccatcaatacctagtttatttagagtttttagcatgaaggggtgttgaattttaccgaagggcttttctgcatctattgagataatcatgtggtttttgttattggttctgtttatgtgatagattatgtttattgatttgcatatgttgaaccagcctcacatctcagggatgaaggcgacttgatcgtggtagataagctttttaatgtgctgctggattcggattgccagtattttaatgaggattttcgcattgatgttcatcagggatattggcctgaaattttctttttttgttgtgtctctgccaggttttggtaacaggatgatgctggcctcataaaatgagttagggaggagtccttctttttctattgtttggaattgtttcagaaggaatggtaccaactcctgtttgtacctttggtagaatttggctgtgaatctgtctggtcctgggcttttttggttggtaggctattaattactgcctcaatttcagaacttgttattggtctattcaaggattctacttcttcctggtttagtcttgggagggtgtatgtgtccaggaatttatccatttcttctcgatgttctagtttatttgcatagaggtgtttatagtattctctgatggtagtttgtatttctgtggaattagtggtgatatcccctttattattttttaccgtgtctatttgattcttctctcttttcttctttattagtctagctagtggtctatctattttgttaatcttttaaaaaactagctcctggattcattaatttttttaatggtttttttgtgtctctgtctccttcagttctgctctgatcttagttatttcttgtcttctgctagcttttgaatttgtttgctcttgcttctctagttcttttacttgtgatgttagggtgtcgattttagatctttactgctttctcctgtgggcatttagtgctacaaatctccatctaaacactgctttacctgtgtctcagacattctagtacattgtgtctttgttctcactggtttcaaataacttatttatttctgccttaattttgttatttacccagtagtcattcaggagcaggttgttcagtttccatgcagttgtggggtttttagtgagtttcttaatcctgagttctagtttgagttcactgtggtctgagagactgtttgttatgatttttgttcttttgcatttgctagggagtactttacttacagttatgtggtcagttttagaataagtgtgaggtgttgctgagaagaatgtatattctgttgatttggggtggagagttctgtagatgtctattaggtccacttgatccagagctgagttcaagtcctgaatatccttgttaattatctgtctctttgatctgtctactattgacagtggggtgttaaattttcccactattattgtgtgggagtcgaggtttctttgtaggtctctaagaacttgctttatgaatctgggtgctcctgtattgggtgcaaatatatttaggatcgttagctcttcttgttgcattgatccctttaccattatgtgatgcccttctttgtcttttttgatctttgttgatttaaagcctgttttatcagagactaggattgcaacccctgcttttttttgctttccatttgcttgataaatcttcctccatctctttattttgagcttatatgtgtctttgcacatgagatgggtcgctgaatacagcacaccgatgggtcttgaccctttatccaatttgccagtctgtgtcttttaattggggcatttagcccgtttacatttaaggttaatattgttacatgtgaatttgatccatcattatgatgctagctgattattttgcccgttacttaaagcagtttcttcatagtgtcaatggtctttacaattgagtatgttttttgcagtggctggtaccagtttttcctttccatatttagtgcttcagcagctcttgtaaggcaggcctggtggtgacaaaatctcagcatttgcttgtctgtaaaggattttatttctccttcgcttatgaagcttagtttggctggatatgaaattctgggttaaaaaatctaccctttaagaatgttgaatattgacccccactctcttctggcttgtagggtttctgcagagaaatccactgttagtctgacaggcttccctttgtgggtaactcaacctttctctctggctgcccttaacattttttccttcatttcaaccttggtgaatctgacaattacgtgtcttggggttgctcttctcaaggagtatctttgtagtgttctctccatttcctgaatttgaatattggcctatcttgctaggttgaggtagttctcctggataatatcctgaagagtgttttccaacttgcttcctttctcctcgtcactttcaggtacaccaatcaaatgtaggtttggtcttttcacatagtcccatatttcttggacgctttttcattagttttcattcttttttctctaaccttgtatttatgcttcatttcattaaattgatctttaatctctgatatcctttcttctccatgatcaattcagctattgatatttgtgtacgcttcacgaagttctcatgctgtgtttttcagctccaccaggtcatttatgttcttctccaaactggttattctagttagcaattcctctaaccttttttcaaggttcttagcttccttgcattgggttagaacatactcctttagcctgcagtagtttgttattacccaccttctgaagcctacttctgtcaattcatcaaactcattctctgtccagttttgttaccttgctggtgaggatttgtgatcctttggaggagaagaggcgttctggtttttggaattttcagcctttttgcactggtttttcctcatcttcatggatttatctaccttttgtctttgatgttggtgaccttcagatggggtttctgagtggacgtcctttttgttgatattgatgctattcttttctgtttgttagttttccttctctaacagtcaggacccttttctgcaggtctgctgcagttggctggaggttcactccagaccctgtttgcctgggtatcaccagtggaggctgcagaatagcaaagactgatgcttgttccttcctctggaagcttcatcccaaaggggcacccgccagatgccaactggagctctcctgtatgaggtgtctattggcccctactgggaggtgtctcccagtcaggaggcacaggggtcagggacccacgtgaggaggcagtctgtcccttagcagagctcaagcactgtgctgggagatccactgctctcttcagagccagcaggcaggaatgtttaattctgctgaagctgtgcccacagccaccccttcccccaggttctctgtcacagggagatgggagttttacctataagctcatgactggcactgctgcctttctttcagagatgccctgtatggtgaggaagaatctagagagggagtctggctacagtggctttgctgggctatggtgtgctccgcccagttcaaacttcctggagactttgtttacaatgtggggtaatggcagaggcccttccctccaccaagctggagtgtcccaggttgacctcagactgctgtgctggcagcgagaatttcaaaccagtggatcttagcttgctgggctccgtaggggtgggatccactgagctagacaacttggctccctggcttcagcccccctttccagaggagtaaatggttctgtctcactggcattccaggtgccactggggtatgaaaaaaactcctgcaactagctcagtgtctgcccaaatggctgcctagctttgtgcttgaaacccaaagtcctggtggtgtagacacccgagggaatctcctggtctgcaggttgtgaagactgtgggaagagcgtagtatctgggacagaatgcaccatccctcatggcacattctcttacagcttcccttgtctaagggagggagttccctgacctcttgtgctttccaagtgaggtgacaccccaccctgcttctgctcaccctccgtgggctgcacccactgtctaaccagtcccagtgagatgagccaggtatctcagttggaaatgcagaaacacctgccttctgcattgatctcgatgggagtggcagaccggagctgttcctattcggccatcttgcccaggtccccggtagtttcatttttaattgattactttgagcttgttgtacataaataaaattacctattggactgagttgtatttgccttacatttgggatacgtacatgaactgtcattttcaatatacatttggaaaagtacaagctacacaaaaataaatccaagttatttaagcttttctgctaatttgctttattatgcatatatgaagaaactgcaaacccagactaggatgcattaaagtttacctgataattctccacctgtgtgtccctgtcttagccccatacaaaatggaattaggagtactttgtatatatactgttattcaaatcagcaatatgttcagacaagagattatttgtaaggaaagaattgtgtctttgtttcattatgagaaagcttggatttctcataaacaggtttggtattcatcaattatctaatatgatagacaatgttattctcacaggtatatattttattcatttttctcttatgaaagatatattaacattggctaaaaataagtctgaattcctgtggtctaaagaagggaacagggtgtagtgaaaacagtatggaaactatagtcaaaagacccagctggagttccagcttcatcacttaatgcctatatttatttaatgtaattgtttatgaaaggaaggaattaccccttccaccccttctaataattctacatcttattagaactatatttatattgtttcttacaaatgtctccttaatttaaaaagagcttgcttctaatggttctttcaagctgttacatgtgcttcaaactcataatcacaaatgccatacaatcatttacacctctttgcaaatattttaaatcactaaattaaaatgttattaaatcaaaatggagctgtgctaagaattgttcatagttgagatgatgagaatcttattatccaaggcttgtagatgtagaattttagaaccaccatgataggcagagagaaggatatactctacaagtgcttttcaatagccattggcagttccatggtgggataaaggggtggcatggaacgaacacaggacaaggaatcaaacagctgaatttcagcacttgcttttcactctatagttctaggaccctatccaaaccatatctcttgtagggcactcagtttgctaatcaataaaattggggagagatgcatataaagtgatctaaaatctgtgacctgaaaggatggaactgaaggtcattttttttaatatttggaatagtcagaaaaagaaataataaaaaaccggtactaagaatggatattcacaagtgaagacattttgaaggtgaaaattttgttagaaatagaaataatttactaaataaagacactgagtcattcctattagcctatgtgagacagtaaacctttttcaacagtttagatatccaaatagaggtatggtatcttatgcaacctgagtttttaataatacctagagagtaagtatttaaatataaatatagaatgatacagagatgaaaagcttgggatcattagccaacaaaagtatttttttacattatcaattctactactacaatggtttacttggagactgtcatagttgatttcccccagaggctgaccttaaaacaaagatctgtgtgcacacagtttgtttgggaagtaaagaacaggctggaagaggagtagagaaatttagtcaatgaaagatgcatttatcaagcaaattgccatctgggtgacagggggttaattccatttggaatgagtgtaaactaattactggaggaggctagtgtagaacaaacacttaggaatcatgtcatttgttgggcaagggagttggagtacttatgtaccaactcctctcaggaattgtatgtgggctgctgggaaggaggacattaatgctctggcacttctaaactcttccttctccaagggcaatatcagctctgtagaccacagaaaacctacaggcaaggaaattcaggtgctggcagttggaaggtgagcaagtatgcattgacatgacaaggaaacagatgaggcaagacattgatagtgtctattatggtgagtgaccatagagacatcagactgtatggctttacaggactctgtcacccaaaggaccaccttatcccaacatctttcactgaaagtcagtcagactttgctaggaacttccagtgacagagagatcactactttgagaggcagccattccctttatgggaaactcttctttctctctccgtcctccaaaaaagagttcttcctaattagaaacttccataatttctgacgtctccaagtatagaagaaaataaacacacacacacacacacgcccctgcatacacacatacacacacagacctacacacaaatttgtacgtgcattggtgtatcatttcctttaaaatatctgataagaatttacattacctagcctcctcctaaatctcatctcacacaaaacagccttagttttttggggtctgaagtactttatttttcccaccccattttacatcacagccctgaaactgaagtcctgctgttatcttacaaggttgtagtttaagtctgttgtttgtttgcaaaagacccttgccttatatttttcttttgatggaactgaagtgatactaaagcttttgtttttatctgcagtaaaatattttaaagcattttgaaaatcaacatttggggaacatttgggagtctggaatttctatagaaaaagaagactagtgaaagtgactgccctcatgacaataagttgtcagtatcatggccctaacacctctgaatatgttgtgccattttctccatgtcactgaattctctggaacatgaaaacaacggagagaggaatttccagttgacttataagatcaaattaagagaaaaaccagttatttctattctagtgtgccactgcatgtctttagtttggaagaccatgttcaatagaatgatcacagcctggtagtaatagttagaaataatatacagcaacttttatagaaggactcctgagtactttataaactattgatatataaaggattaatgtaaaatctgattgtggattaaaggccaaactatcattaatttgcaagtctcaaattgaccttaatatgttagtgtttctgacatttatatcctgattaacttctttattcattccttgaatcaatatttatttagtgtctattcattcttaaaagtctgccttgttctcttaagcaagtgatatcacttcttgaaacccactgcgttccccttattctgctctgtattttagtcatttctgtgtgtctcttccccttatgagataataaacacccttgtaacagcagcactgacagacttatctttataatccttaaatctcttagccttaatcgtataggtaggaagtactccattggcatttgttgaactaaattgaactgaaaagtgaagtcaatatggaaaagtgtcctaattcattttctccaacttccatcaaagactaaggatttggaagttgcattcttgaagattggttatgccataatttgttaataaaacagttaaaaattacaatgtttgtacctggcattcaccttattaatatgcataggcctgattgcctgattatagaatttaattatttgaccagcaccatggatattcctaaacaactctctgcttcttaaaaaacaaaaacaaaaacaaaacaaacaaaaccccacacacagggaaaaaaaagtaatgacaagaatcaattagtcacttctcttaaacacgttattttggtaaggattatcatcgttgagagcgtataattgatccttcctaagctattctacagaactctaaacagacgatcattatttttagtctagttgcaccgtttctttttttttttttttaatacttttaagttctagggtacatgtgcacaatgtgcaggtttgttacatatgtatacatgcgccatgttggtgtgctgcacccattaacttctcatttacattaggtataactcctaatgctatccctcccccctcccccaccccacggcaggcccaggtgtgtgatgttccccttcctgtgtccaagtgttctcattgttcaattaccacctatgagtcagaacatacagtgtttggttttttgtccttgtgatagtttgctgagaatgatggtttccagcttcatccatgtccgtgcaaaggacacaaactcatcattttttatggctgcatagtattccatggtgtatatgtgccacattttcttaatccaatctatcattgatggacatttgggttggttccaagtctttgctattgtgaatagtgctgcaataaacatacgtgtgcatgtgtctttatagcagcatgatttataatcctttgggtatataccccgtaatgggatggctgggtcgaatggtatttctagttctagatccttgaggaatcgccccactgtcttctacaatggttgaactagtttacagtcccaccaacagtgtaaaagtgttcctaattctccacatcctctccagcacctttatgcagccaacagacacatgaaaaaatgctcatcatcactggccatcagagaaatgcaaatcaaaaccacaatgagataccatctcacaccagttagaatggtgatcattaaaaagtcaggaagcaccgtttctttcaaaaatataaaatatgcagattgtcttcccctacatttttctgtctttaggaaaggccataattaattttgcaaccaactactcaccctgggcattgttttcccatgacaactaagccagccacacttgtgtgaacacagttccattttatattcctatctttcaactcaaactgtttcttttccctatttatatattttttaaaaagcaattacataggagatacaaggtttggtctgcacccacagtcaactcattcaaatttattctttacagaagatactcttcacttttgttgagatgatgaaagccatgtgaaaccacaacgatgacactgtcagttttacacaatcatttaaaaataaacaacaccctatttacaggacaccactcaatggattgtaaatcgaattttttcacaaagaaactaaggcaatgagaacttcacagcgtttgtgcagtacatttgtttttttcccagccaggatctggctcagcagagatactgatgcctctagcatcaccagccaggtaaataaatctccagatccctgctccccaagctctcagttaccagaatgttgatgcatatggagctctgcaagaccttttgtgccaggaattttgtccctttcagttctttgtggtattataagtcctcactctttgaaaatgcgttgtataagctttaatttattatagttttttgctaaacaatcttgaatggacaatgagttctttatggagacacccagtgcagaatttttactgattccacatctttttaacatttacaagtatttccacttaaaatggatttttaaaattaaactgacacatttttgactgcagtcacaaagaaatcacaagctgagagtgttaagaaataagaggcagggtgcggacaggggcttagagagagtgcaaaatggcttaaatagccacaccagaagaacgtatagtgaatcagcaagagataaataacggattgctgagtggcaacaacccctgctgtagccaaatagcaggaatctgtagtagactccataatagaatatgccaatatgccatttcgtggctgagtggcatcaagcatcctcctgataattaccttttgcacaagctagactggagattcccagaaaataagatggctccatcctgctccacccatgttaaatcactcaagtctagattgcccaatatgacacctaattcagctatttcataaaccgagctttctccacaatcccatctatttgttgcttgtcctcatcttcatggtaagattctcaaggaaagttctattttagataaattgtggactagataaatctggcaatataaaacatggaggaaggttatgtaaaatattataaatgcatagctgaacttccaagacagtaaagaaaatcttcaggggccaagatgacaggcagctgtgatgaaggaaattgccagattgggtaggctgattggtcatttaatgctttcccaagaacagaagctttgggttcagtcaagtcaatacataaagccagaccagtgaagggcaacagcccaataaaagggtatagctgaaaaaattctgtcccctgtacagagtcaactaagtgttttctgccttggcctaggcttagtttggtgaggaaaatatcttccttgagaatctgtcgtcacagccttgttcttgaggcagattgtattttgaatttacatcatatactgtggtctgggaatctagaagctgagaacttatcataaaagtggcctcaggccagtgataccaatattgcagtatctattagaagcaaacagaaaacatctttgaaggattattttaagagatattggcagtgaatttcccaggattgttaaagggcaatcagccctcatagtcaggaagtacaacaaatcctaaacaatatgaacagaaattaaaaagtaaaaatctaaacaacttgtactgaaactggagaacattaaaaatagaaagaaggtcttgaatgcaatcaaaacaaaaacataagatcagcagaaattttatttcaccaatagccatgtatacaaaactcttttccagcacaattcatatgttctgatcttatttatttatttatttatttattgttgtgggtacatagtagtatatatatttatggggtccatgagatgttttgatacaggcatgcaatgagtaataatcacattatggagaatggggtatccaccccctcaagcatttatcctttgtgttataaacaatccaattacacacttttagttattttaaaaatgtacaattaagttattattgactatagtcaccctgttgtgctataaaacagtatgttttatacattctttccagctatttttttctgtacccattaaccattcccacctccctcccacccccactacccttccctgcctctgataaccatttttctactctctatgtccatcatacattctgattttaaaacggttttcctacatttcatacataagtcactcaagtacacagaattatttttatgggataataaaatgcttaaaataatttaatttttgtctttgacaatgaacgtacctgaaaattgtggctttcactgttatcattgacgacaccagtgaagttacaaagctgctcattagtaactgaaattagattttctcttgttgaaggaattttcagtttttcagagaatgagagttgtaatctctaatgcaaaaataaaattgaactttgaaaagatctctagaattttttttaaaaaaagatgtttgagtttctaatttcctaaacatttctgaaaacattctcagaaaaaaaaaaagaatccaacagagagaaaagctttttgattttttttttctttttgtaattataagaaaacactactgcattcatatacaggtgagaattcactaaatattttctggtattagagatgtctataaacagagattgtgccttagaaaaaccttgcttgctactcagtctactcatagatgactattcttaccctattaagacaccaagcagcctatcttccatttttataaattatcaataagtgaagtacatctaaattcttcggatgaaaatcattttcagtttctatgttgatgtattctcatgagaaatatatgtaaatgttggttcatagcattgtcattctttttaaggagattataataattttctgaacgaggttgatagaatgtgatttaaataaaagtggtactttttaccacttattctgaatatggcttatcaattcttctaactatagtacgtgacttttattttttaaaaaactatcattttcccatcatgattctacatggaattatgctaaaatagataataattttaaaataatatttcagtgaattaaaattgattttctcttatttgcttatatcttcacagattgtaagtgttggaaagcatgttaaaggctaccattatatcattgcaaacttggtaagaacttcttattttctacttttcataagaattgctcaagcacacaagattattttaactgtgccttaaataatgcttcaataaatagagtacattacttactaagcttttaataacacatgatattttattacaatgatcattaaatttcaccagtagaattcaatatatttttatgcagattagcttggtatctgctaaagagacctttaaaagaaatgataatggttactttgctacgataccacttgtcaaattaaataattttctctgtctaaatgataaatgctactttatagacaaagatagccaatatttggatattataagaatgatctaaactaatagcttatgttctctaattttaagaataactgtatataatggctatataagcaaatcttttaaatgggagtaatccaaatttttaaaaattatgtcaacttttcacatatcatatagaaatggctaacaaacaagatacacatatttttatgaaattcttaaaggtctgagagaaatccttttagatatcttggcaaggctcattgaatatgtcttgttaaccatgtagtgtagggggtagattatgtatggagcggcccagcctctcttgctttattatagagtaccatttgccctaagggcctgattcccaaagtgatttatattggagaagttaaggatgttttctccttttttttttttttttttttttttttttttgagacggagtctcactctgtcgcccaggctggagtgcagtggcgggatctcggctcactgcaagctccgcctcccgggttcacgccattctcctgcctcagcctcccaagtagctgggactacaggtgcccgccactacgcccggctaatttttttttgtatttttagtagagacggggtttcaccgttttagccgggatggtctcgatctcctgacctcgtgatccgcccgcctcggcctcccaaagtgctgggattacaggcgtgagccaccacgcccggcctcctttttctatttttatgacacttttttttaatgactatcttgcgcttgaaacaggaaagaaactaaaggatgcaaaagagattcagatctacccattctttccgtatggcaagtggactgtcagactttgagacaggaattttcggtctttagtgaactgggtttggttgtggatctgagatattaaaatacagcaaaatactgtgaaccatgattatattgtgtttcttagataaagtataatcttgcgacttaatggattatcatgaaaatactgagaaattttgacttgtctttttcattgctttttagtaggctgttttagtagagtgtttcactattttttataaaaatataaaatttaagacaaatatattctgatattaattactataagagaaaaaaacttaggattatgagataactaagtacagtgaaatgtacaatgagactctaatgacttttatagcaaataggttttgtcatctattcttacaaacaatagaattgaggggaaaaaaatcaatgtgttatatgtagattatcattccagaaatgagttgctgacattggcaattaaaataaataaatcaatacaagatggaatgaattaatatttgtaatactacaaaggatatcgtaaacagccctaggagatggcagtgtatttaagttatctagcgttccagtatatgaagtagaaaaccatttttgtttgcagtagggactagaaccatcactttcactaaaaatcagcaagttttattatatgtggttgatatctttgtaacacatgattagatcagtggctgccatggacatacattataatacagtgtattaatatggattctattgacttattcatttatccctaaaggactattacttataacactagagtagtttttattttattgagccaatcaacaactatttttgagagctatgtgcataagattctcaaatgtgaagtcaatccagaatcaaaatgaaaaattacatcaacatcatacttaaggttgaaagactgaatgattttcccctaaaatcaggaacaagataagagtgtcctctctcaccacttctattgaacgttgtactgaaggttctattacagatatttaggtaaaatcaataaaaggcatccagattgaaaaagaagattatatgtatataaaaatactaaggaatcaaaaaatatttatagaactagtaagttccacagggttgcagaatgcaaggtgaatatacaacagtttattgtatgtctatatgctagcaataatattctaaaaattaaaccaagaaaatatttcattgataatttacaattacaatttacaattaatggagaactgctatacttaaaccaactcatcaagggtgatttaacagtattagtaaaaaactgatttctacaataacaattcttacttgtgatgtttacaaatattccagaatatttaaaatattctgtagtcataatgtagaatataaaagcagaaggtatgaagtccaactcatatttaccaaaaagagaacaatgaaattcagcagacatcaatatgggatgcatgaaattgggtcatgaatttacagacatgcatttttgtaaaagtcaaggacctcccttatttaaacaaggttaactccctggagaaactgagtttaaatataggtgttctttagattctttaaaaatgataatcttttaaaccaagaaacaaagtaaggaatgtcactgaaatattggcttcataatggtctttaaatttttgagctgaaatacagaaagcagatttcatgtaattaaacaaaataataggcaatttctttgtgaataaggatgcaaataggttatgaatgctctctggcattattttaaattgtcttgtcattaactacaagttgaacttttcttcttcaattaacaaccattcaatctccttcatcattctatcctgataaaatgagaatacattgatgtattctatgcccctctgatcttagcttttggagctattgcagtgtactggcatctcacctccaaccaggccaaaagaagtagaaatcctttcccttaatactcaagcctgaacctgcagaaggtccaagaggagccacagggagctaacatcatctgaacagcatgagctatgcctgatatctaattgaatgggcatgcccctccctgattcttgaaatttctctgattatctctgccactatatttaacaattgcacattaagtgtgagtaaaacttgctagaaatgaaagattgctgcgattcttttttcttttctatgtcctatatgggatttgtatgtaggtgcatgtatgttttattaaacccatcatctagaggtactggtgaaagcgtatgatatcgcaataggttaagctctgttccaaaaatttcccagagaagtagaggcaggaaaaccttatctgtcagttggtttatcctagtctgtttcttagagattcaagtaagaaaattgcttccctaatttgcccctagactttctctttcctagttcttctttcatttagctgccagttgttttttaaagacaagtatgatgatatcgtttgcttaaatctttgattggccccaggctgcaaatacagtaaaagacatcagatttttcatgacctgattccccatggggtttccagacttacttgctaatacgtgtctcacttctcctcagagtttggatgtctctccaaatgacatattgtcccaactctgagtcattgccccaatttttaccaccatctttcagagtaagcattgaaaacctaagcactgctctacttaaatattttaggaaaaaggatttgcactcttgaacttaatgcacaaagccctttaagattttatccctacttgaccccacagtttttcccactccaccccacaactatcccttcttcagaccaaactaattcccagacacctaatgctgctttcctcttcccagttttgtttaggctgttatctctatcaggaggtgtttaccccacccaatcctagtcagtggttacaattacgtctagaaagctatccctaaatatccactttgatagtccctcctctgggttctcaaactaccctgtgtactcatagtatagaacttattcttgttttttcatttatcaaattattattttataacccctctgtaacaggtactgtccaacatcccacggcacaactgcaaataaaacactgcaagctcactgaaggcaggaacaatgtcccttttgttaaccttatgaaagagtccttatccctattctttatctgctgaactcctgcttatcctctagcacccagcttatgttattgtaattgtttttgttattataattgctttaatttggccttgaaaaagatttttaatagatacaaaaatgaggttcagtgtaatttacccaagatctcgcagatctgaattctcaaagaaaagtttgaagctctggcctgtctgattgcaaagaataaatacacaaaaaaataaataacttagggaataatgccaccaagtgaccatttacttaatcatctcccacagcacccgtcagggggacctaatattaaacacattgctctgtattgatattcactcctctaccagtcaaataatttaaatatggccaccaatagcaaaaaggaacagttgacatttgtcccattaccaagacaaattcttagaatcttgttctcctttagattttttatttaaaaagtattatttaatttacatctaggagaacacctggctcaatcattaaaaagatataaaattacaaaatgttctggatatataattaaagatgaactgaacctatttcttacctatcctccaccatgtcacacacatataccactcacgcctcattcagaacataaaggaaattaaacattaggatacagagagcaaagtgacttgtttncatttaggtgtttgattagtttcagaatggagagtagacatgcttcccaaaatttgcagtctagcacatttttattgacgtgcagtgaccctagttaagattccatcaacttggcgacattgttttacttttgtgcttcccgttttttaacttttctgcattgagcatgtctgactctaccatctatctacatgcatatgaaaagtacatactttaagtcaatttcttaactaatttttacaacatggtaagctagcaattcccccattctatttgacattccttccattaattgcaccagagctatctcaatataatttagtcaacctacgaaactgaaatgcaaaatacagcagaaatgttacctgaattaagtagaacttaaagaataagcatttattaaacagtgatgatagacctgtaaatttacataaatagtcatcaggatatctgatacctataattttaaacattttattttcccccaaaagatgtatgaactacaaatagaaattaaagaaaaaccaagttggacgttaatctagagagtggtaattaaccattgtgaaattcaagcaaagtagtggcccattttaacaagagaaagcctttcccatgatctccccctgccctcagagactttatttactgaagtcacttaaccactgatttcttcctgactatggagtgaataattttattacaatgttgcccaggaactctcagatccactgtattctttggataaaaattgaaatcaaaatggccaccaaaataaatgtttctgagaaaactgcttcactgtctagatcctatcaattttctatatgaaattgtaagaaaatatatgaaagaaatatatgaaagaaaatatatgtaagaaaatatgtatgaaaatatatgaaaaatattgcctgtactcaaaacagacatagctgaaattaactgagccacccactattcattgaaatcataactgacaatggtttataatcagacatggcaatttttccctttactttcagcataagaacaggatggactcgaaaatgtgaactattatttatcagctagactttacatcagatgatttttctgaaggctgcagctttgcctctttatgctgcagctgtggataacgctatgaaagaaggtttggcagaccttctatttcagccatgtttgaaagaaaataataatgtcatcaattagcaactaatgcaatagttgaattactgtggcttttagaaaacattggaatcatttgcctgcctgtgggtctgccgtatactctgatagaagcaaaccaatgttcaactgacattttactagctggagattgatggacagtgtttttcccatttcagaaacataggtttactttctggcgtctagtttctttatcgacaaaatgagaatgttactgatgagctgtcaaattagtgggcatataataggcatgaaataaatatctgttgagtgaattaattgataatagtgatcatttactgaattcaaaccagatgtgctggataccgtagcattctcattctcattttgaatgtggaaggtataaggttagaaagtaacagatgtggaattcaaagtgtgggcttttcgaggggaaacagtattacactgcctttcctatagatattatgataattaataaaatttaaaatacctctgtgtaagaatatgcaggagtataaggtgaaaaagacaaactcaagaggtggtttgtatggctggaatcttagctctaccatacatttgctggatggctttgaatagcttttcttcacccccccgagcctgttttcatatatttaggataaggccaataataggatctatctcataaccttgttatgaaaactaaactagatcaataatctgtgtaatacgcttagcacaatgcctggcatataataagctcagcatataatagctgttagctcgtatacctgggcctcttgacagcaatttttgctcagttgccagtagactgatatattttttcgtagatagccaaacagcaatgcacatatgttggttaggaagacaatctacttcactataaaagaaaaaggaggaggaggaggagggagggaagagggaaggaaagaaacaaataatctgaagatcccaaaaccatagccaaggtgcattcagaaggacaagcaactccaagtcctcattacttcttactctaactgcaggattattgctacatatttttttttttttttttttgagacggagtctcgctctgtcgcccaggctggactgcggactgcagtggcgcaatctcggctcactgcaagctccgcttcccgggttcacgccattctcctgcctcagcctcccgagtagctgggactacaggcgcccgccaccgcgcccggctaattttttgtatttttagtagagacggggtttcaccttgttagccaggatggtctcgatctcctgacctcatgatccacccgcctcggcctcccaaagtgctgggattacaggcgtgagccaccgcgcccggcctattgctacatattttattcccaccaaaaaataaacaaaacactctccttcattccctcagcaaattgaagcatattcacatttgcaaaagaacctttactaaatactaagagaaaacaaaaagaaagcaattacaaaagctacgagctcatgcgtgtgtgtgtgtgtgtgtgtgtgtgtgtatgtgatttacttttctctgagctaatacctatggctttattaattcacttccttaataggctttttgctctcttcttgctattatctgttttacactttttattgagtgtggatttttataaggtacctaaaatagtggcaataaaagggagccaggtataaaacaaaggtgataaatgggtagatatatagatggaagatagataaaagacagataattggtagataggtgatagataatagatacatgatagataatggacagatatagatacatacatacatggatagataatagaaaatgtgtacacaatagatatgatacatgagagggatggagggagggagggagagagagagagagagagagaaaataaataattgtccagaatttttgaatccttgattactacctctaggcaagaagggatagtatccttacttcccagcttcttcgctccatctggtggacaccatcttttttcctaccacacaggagtccatgaatggcctatcttgtgctcttctcttggactaccatttctcggggcacttagactgattccatgactttactattgtgaatactgctgcaataaacatatgagtgctgatgtctttttgacaaaatgatttacttccctttgggtatatacccagtggtgggattactaggtcaaatggtagttctatttttagttctttgagaaatctccatactgttttccataggggttggactaattcacattctcaccaacagttgcagtttttattttttcccttttctccacatcctcaccaacatctgctatttcttgagttttaaataatagccattctgactggtgtgagatggcatctcattgtggttttcattttttctctgatgattagtgatgttgaacattttttcacatgtttgctggctgtttgtatgttgtcttttgggaagtatctgttcatgtcctttgctcttttttaaatggggttatttggtttttatttgttgatttaagttccttatagattctagatattagtactttgtcagatgcatagtttgcaaatattttctctcattctgtaggctggctatttactctgttgattgtttcttttgctgtgcagaagctctttagtttagttaagtcccatgagtctatttttgtttttgtttcatttgcttttgaggtcctagttataaattctttgtctaggccaatatccagaagagtttttcttaagttttctagtaggatttttgtattttcacatcttatgtagtctttaatctatcttaattttggtatatggtgaaaggtaggagttcagtcttctgcatagggccagccagtttccccaatattatttattgaatagagtatcctttccccttctttatttttgttgacattgtcaaagatcagttggttgtaggtatgtgactttatttctggtttcattattgtgttccattgatctgtgtgtctatttctgtaccaaaaccatgctgttatggttactatagccttatagtatagtcttaagtcagaaaatgtgatgcctctggctttgttcattttgcttaagtggctttggctattcaagctttttattagttccatatgaatattagaattgttctttctagttctgcaagaaataatgttggtaatttgataggaattgcattgaatctgtagattgttttgggcaatgtaatcattttaatgatatttattcttcctatccatgagcatgggatgtttttccatttttaggtgtcatctatgatttatttcatcagtgtttggtagttttccttatagaggtctctaaccttcttggttaaatgcattcctggatattttgtatgtgtgtgtgtggcaattttaaatatgattgagttcttgatttggttctcagcttcagtgttgttggctatagaaatgcaactgatttgggggcattgattttgtatcttgaaattttactgcaattgtttatcagacatagtagtcttctggaggagtctttaggattttctaggtgtaggatgacatcattagtaaacagagataatttgacttcctctttttcctatttgaatgcctttttttctcttttctgatttttctggctaggattggaggtactatgttaaatacgagtggtgagagtggacatccttgtcttgttccagttattaggaataatgcttcaagcttttgcccagtcagtatgatgtttgccgtgggtttgtcatagatggctctaattagtttgagatatgttcttttgatgcctagtttgttgaggatttttattatgaaagtatgttgcattttatcaaatgctttttactgtatctgttgggaggatcgtaaggtttttgtttttaattctttttatttggtgaatcacatttattgctttgcatatgttaaaccatccttgcatccctggaataaaacctacttgatcacagtgagttatctttttgatgtgctgctggatttggggtgctggtattttgctgaagatttttatgtctgtgttcatcagggatgttggcttgtagttttcgtttttattgtgtccttgccaaatgttggtttcagtatgatactagtttcatagaatgagttagtgagaaataggagactttttgatgcaatcatatttatctcctgtatccccctttatacttcataaaaggcaatcagaggcattcaagaaatacttgatttgaactgaaataaaaacatatctttgtctcatgtattggattttgaattacagaatttaacagctaaatagacataattagattttccacatcttttattatcattttccacatttttagccattgctttattaaaaatcttttaatatgtataggttattaatttatgttactattgaagagctgccatgtataataaactaaatttaacaatcttttgtattaatttttatagggattcaaggatatttctcttgagaggtttatacatggtggagccaatgttactggattccagttggtggattttaatacacctatggtaatcaaactaatggatcgctggaagaaactagatcagagagagtatccaggatctgagactcctccaaaggtatttgtttatttttatctactgtattactgatagtttcaaaatttaagatgaaaagtttattatacagtttttccattaacattttgccaaacatagtatggcatgggaaaaaagcattttgtccttataactgccttgcacatgctcttaataatttctaaatttctgtatttaagagtagagtttctagacattagctcaggcagtttactattattattacagtactatacatatgaattttctttcagaattaaattttttttaattgttaactaaatgcttcaaatgtgaaagagcatccgtaacttttctcccacacagaaatcttcatgaagtgatttaaaatgagtaggcaaattaggaatttagcagaaatataaaatatacaagcttctgcaaaagttctttcaaattaacgtgaaaaatcaggttgttttcattgttttctgactgaaattgtgaacatatgctattaatatttgctcagaaaaagctggtaaatttctgatcataagcatatttgatcaaactaaacagatagatgactttcttagacctcatgttaaattatggcataatgtttcttaaattccaacttagtggtttgagcccctacctaataaggcaccatcatcatcatttgctaatcttttacttacagtgtattccagtaaaaagttttatgtataatttggaaactcaagcctagaaaaaacaagatctaaggctagagggcctcagctctgcttctattttctaattataatatttcatattggctatgtccatttcttctctgaaatactggaatttggccagctcagcataccatcttcactgccttataaaatcacagaatttcaaaacagaacattaaatggatgtccactatgtgtcaagcactgttgtccaatcctttgattttacagataaatacaagcaaattattaaatggatttgttagttggctgtccttgagtcagggaccaggttcatggaatacacaggatataattattttaatgtctcctatttgattatatccaactagacttgtctatgctatagctttgttctctttgttatataatcctctcatccttcacaactcttggcatgatggtaggcattcagtagccatttaataaataaatgcagtacaattagttcttattattcacagcagttatgttctataaagtctctttaaatactgaataagtaaatatagaactattgctccaggggaaatatagggttaagttctgctagcctctggttacaaactttttgtcaactattcagtatataaccttgttttatgggtgtttgtgtttaaagaaaccttatttaatgtattgttggttcatggacattgaactcctggccaacagcaccatggttcatgcccgaatgaagcttatttaacatgcgcattttctccataaggcacatcacagccttcttgcacttgcgaacactaaacagcacatcaacactatgcttttgggccatgttaaacagtgaaatcatcagcaaaaagcacaaaactgcagaaaacatggcactaaatagaacacaaaaaggacacttgtttacagtatgagagcagaaacaaggaaacagtgtttccttgttcagccacagctgggaccttgtgtgttgggttactcaaatttttcaccactctatacagttccacaaataaccacaaaagtgccacaagtatcgatttaagagtaacaaataaatattagcaaggaggaaaatttgaaaatttagaatccacaaataatgtggattgattataattaaagtgtactctaagtgtttaatttttcaaccaagattaaaagcatgacttctgatcgtgtcacttccctgctttaaaaaaatctcctggaatcaaggttttccattctataggccaatcaggcctttccaagtgcatgatcctctgcctcctttctgatgctccagccaatgtgagctgccctgcatttccccaccctttatcactccctgtgcacgtgcttctacctcaaaagtcctccaccatcatgtctacctgttgaaatccaaccatcttccaaggctttatctcaaattccactttctctatgaaatcttttcttttttcttttttttcaggttgacttatttatttttttgagacagagtctctctccgtcacccaggctggagtgcagtgtcgcgatctcgcccctcactgcaacttccacctcctgcgttcaagcgattctcgtgcctcagcctcctgagtagctggaaattacaggcctgccccaccacacctggctaatctttgtatttttagtatagacggggtttcgccacgatggccaggctggtcttgagctcctggcctcaagtgatctgtcccaaagtgctggccttacaggcatgagccactgcgcctggcccagatctggtatttgataccacagcagggtgattacaatcaacaataattcactgtacatttaaaaagaactaaaaatatatatatatatatattttgtaaatgtgattcctttcccccttgtaatctccatagtatttgattgggcaattctcatcagggatttcatataattatttgcacacttactgtttcactcctataaactctctggggcagtaaccatcaaatactcatctttgtagtcttcatgattcctagctagagtctggtacatttttcaaagagctctcagatatgatatgaaatttcatcctcataataatcacaatagagagtcactattatcttgtttcatttcattttgctctgttttatactccataaccaaaaaaatgtgcttcacattcccataaacctgtgtcacagaattaaaattcatcccagttctttcttctctaagtccatactttttctaccgcactatgattctgcccaattctgtcttgttatctataaatcttagtaaatagaaatcatttcatcattctaatcacttatcagagcagtaaataactatagggcactatttaccctgcctaaaaatgaaatgattagtaagaatattctaggtgccacctagaacttgtcagcccctaactgtggattcctggattatagcacaataagacacatagaaaagaattatatcttttgaaaaggtaaaactgatttaaactactttttctttccgtctatcagctctatgacctgtcaaatcccaggtctttgccactctggctgaatgtctcctttgctctgcaccactctgtgtgatacctgctcttttttctggttcacatatttcataaaaataaacgaactttttaaaacacaaaaagtgcatttgctttttggtgccatctcttctcagcttctttcttcctgttgaaaaagtggcaatatttttctttttttcctcctttggtcctcaagtactagcattgcatttttctcttgccctttgtgacttaggcaagattcattttatttctcgtttttattttcttgccttacgaaaaaaagatgatttgatgactttctctactcaaagatgtgttgggtcaggcagagaaggagcacattcagttttggtgtagtaccttgcttaaacaccttaatttttctcagctaccccatcccaatcaattgtgaagggcacatttatccagaagcttgttttatcatgtcctgggggaatatataggaaagctcttaatttacatggttcttttaaatccttctaatacaagagttatatcctatactattgaacagttctttgttagaattaatgctccttattttatccatgttttagtttttctcttccctgtaatggtggttgctatgtctcatggccgtgttgcctaagtttactttcttttcttttcttttttttttttctttctgagacagggtctttatctgtcacccaggctggagtgcagtggcacaatcattgctcactgtacccttgacctcctgggctcaagcgatcctcctcccacctcagccttccaagtagctgggactataggtgcacacaaccacgcctggctaatgttttgcagtttttgtagggatggggtgtggccatgttgcccaggctgctcttgaactcctagactcaagtgatccacccacctcaacttcccaaactgctaggattacaggtgtgagccaccatgcccagccctaagtttactttctacaattggaatttcaaatgatttttcttcatttgaaagcacaaaatcaaggagatcatcctccactttctacagcacaaatctactgctcaaacaggcatggaaggtgttaattataaggaactgaccatatggaatttctaaaggagataatgtagtttttgccatgattagtagttagtagttgatactatttagcacagtgactagtacatacccattttttgaataagtagatctgtcatgcttcaagaaaattgtgccccatttccatgtgttcaggaattttctaataagtctctaccacaagcgatcccatgttgatttatttttatatttagaaaactacatttttatctcaatctttcctcactttttcccctaatcttaataatcttttctcagaggtggggggagctcactcttttctcaaagagaagcagatggtctacccttcacatctccacttggatcctaggttatattgaaaactttgaccctaggttaacgaaatgactttgccttcctgtgcacctgcattgggtgtggtgtggcaatatccattcccatttagcatagtcactgatgcatacacatttgttggataagtagatattatttctggcatcatatttctgaataacaataaacaattccactcattcttctgggagactgaacaaagatagatacttcaagtccatgaacttatattaaatctcagggaaccttgctaggccttttggagcaggaaaagattaagaggcccagccctcctggggttcaaccacagaaaccgactacaaggcagattacaaagctgcattagcctttgatacnttagctatttgtactgggacacaacagaaaggccttgcctaggggtctttcttctccaaattgatggaaaactgttttattggaatttctatttttcagaatggtttttctcctttttaagtcaggatgataagatttggtatacaggctttatattaaagcaagaatagaaatttctgaagctagagtcaattaattatcagtaatttaaccatccttcagacagaatggtgctttatgtcataaacttacaaagaccccagaccatttctggcactcgataagattttaacatttaccattatgttcattttcattnggttagtacacctctgctctgacttatgatggagtccttgtgatggctgaaactttccgaagtcttaggaggcagaaaattgatatctcaaggagaggaaatgctggggattgtctggcaaatcctgctgctccatggggccagggaattgacatggagaggacactcaaacaggtaactcacaattttatttaagttcaattcatttcatggtcttgttttaactgaatgttcaaaaaacagactaatttatccaagcacaaatacatattacaattgctacttaaatatatcaagccatcatttttggaacatttctacataaaatacaaggtagaatcttgctgtttacattttatgtggatgcataatcaggataagctaggttatgttgcagtaataaaaaacccaaatcacagtgactcaaaacaacaaaggagctttgcttattcagacacacgttagattagcaggggctcttggctaattgtaatcactcgaggacgtaggcttgcagagcagttaccatcttgaattctgcaaagggaaatggatagttgggggcaggtttcaaattggcaattaaattctgtggcttgataatatcacctgtcctgcctatttacaactcatatgtcagaaagagtctcatgggcctagctaaccacaaggggttcaggaagtataagcccacttgggtcctggaacataccagaaccagaaataatgactacctctggagatctttaaattgctttgtaactttggattaagtagtttattttagtcttttataattatactaacactatttgttcaaataattaaggtaatatatacatatttaatgttacattttaaatgttctgaaatgtcacaggttcaaaacataggtaaaagcaaattaaaaggaaatttggaataaaatatatttcaatattttcaaaaatgtccttatactttttgcttcttatatcttaattttaatattagcaaggtgagaatatgatctggcataagtatcagggttatttaatccattttgtggatatatagataaaactgaaaagtaaccataaaaaattgccattcctataaaaatactttacaattgagggaggattcttcgactaaaaatggaaactttataatagtaaaaacaaataaaacatattcctcttccaggggtatagcaaaattgcttatacatccctttgatattcctatttcagatgctatcccaatagctcaaatacctaatggcatttcagttagttggttatagtttatagttctacttttttaagtagttataagcccagcagatgaagttaaaattcctataagtgaaattgcaagtgaacacgtgtggttttctttttcacttaggttcgaattcaagggctgacagggaatgttcagtttgaccactatggacgtagagtcaattacacaatggatgtgtttgagctgaaaagcacaggacctagaaaggtgagccacgatcaaactgaaaaacagaattctctgtttcttagtttgtatgtaacattttaaaggtgtacagaagaaagatggctgaacatttcctttttttgtgagtacttacaaatactttagtactttctttataatcaatgctgtgataaatgtgtgtgtcatgtaattgtatttagtagtgtgcccaagctgaaacaaactaatttatacactgtttatatctcttatccaaaatggatgcaatattttgggtggggttagcaaaaagaatcccacaaaacaaaattggctctgcagaagagaacacgaagcagtaaagagacataagcacctcaaggtagtcatttatgaaattattagagcaagtacaaacaaactacttctaatgggtgaacatatttagaataggctgggtgttcttgaagtaatcaactagataaatttcaatgaccaaaagagaaagaagatggatggtaagattattattaggctgagagggagagaaacatctaagttgttcaggaaggtgctggtgctaggttcctggatttgggaagataattatctagtggtaagatgtgaataggtataggagcggtcttcccagcattcaagtactttatacagtgcaaccatacagccccaccacagtaattggttataagtgttttgtagctaactcatgtaatttttaacattccttttatctaggaactaggatgttcagggaaacagatattcaagttaaccttatctaaaagctgtatttggctgtttaaaaaaaaaatttccaaaatatattttcatgtttttatgtaatgataactgcaatttatgaaatgcctgctgtgtcctaagcactggacttggtgctttgcatgattccatcctcatgacaaacctataatttgagtagtagtatttctctttttttcaaatgagaaaattatggcccaataagttatcttatccaaagcctgtaagtgagaaaacatattttactcttagtattttctcccttactgatctacataggaagagatgatttcctgctggaggaaaacaaagaaaggaaggctgcatggaggaggtgggatttaaaattgccaggatgttagagtttggataggatgaaatggaaggggcaacaaccgaagaaaggcttggaggcaggaccattaaagttaaggtgatatatggaaaatggcaaaggctttcccagttgcgttttgcttcagtctacaatatgggtgtgcttctgtatctgtgagaagtttggagctgccgtgaaaaccatctctagatttccatcttcttaatggcatagccctcgtgcaggctgccagctaatacgtggtaagctggagcctacctgatccagatcaggagtggcaggagatggatggcagccggggggcccagctgcacctcacagcaggctcttctaaggagattgactgaagcaagggaaggagatgttaagaacagcccactctaccagcacacagccagcaacaaaaaagaggcaagttttcattagagatcctctgctagctggggagcagataggatattccacaggcccctaaaaatgttaacaggtggacaatgctaaatgctaacagatggacaaaggtaagactggctcacctccttgccacacaccagaccttgcaaaatttgccatttaaacagaatattttaaaacgcaaatgacaattacttattttacaaaactataagtgcagaacatcaaatcattctctataagagaaagaatagtggaaaaagaaagctggtgctaactagcagtaatatgaagtgggctattcatagtactgaatcttttcatagcctattgaaccatgatggtaacaaaaattaagacttttcaaagagaaacttaaggagtaagttgggagagtgatgaacagtgcatcttcacacccagctgacactcatctaaggctcttaaaagaaatatgaagtataaaatggtgtagactcatctatcttcttttttccatggcaacgatcaactcgggcattgtgtcaggaatattaaacttaaaaatgagctaccatgagagacactatgctggtgaaactaggcaatgtgtctgagaagtgagcaatcattcttgtaaattgaacacttgccagcaagggagctatctttgaaaacagatcagagagtcaacccatcagtttgtctgacttctgcaacaggaaaactgatagagagtctcattaagcagaagccacaaagctctttctgaagtcccagctgctaagtacagcagaatcttcttatcactccagtgacccccatccagggctccagagggaatgctccagagctgcatggtttcagaaatctttaattgtaaaaatttcatgtattgagagcacattatatgccacacactgtaatggaaaattgatgtgcatttttatattcaatcctcatgacaacctaaaaataagatatatatttttttctccttttatcgaaaagtaaggttcaaagaaactaagtaacctgctcagagatgctcagctagaaagaggtggagctgcagtagaaaccaaaattcctgcagctcaaaccaaaattcctgaagctctagagcatcactcaagatcttgactcaggtttcaagatcttgaaacatcatcagtcccactgcctataagggtttagggctggtgtgggaattaggtcagatttttcagggcaggtctgatcaaagcagctctccaaggaaccaactttgagtagaacaggagctcctcacagccgctcagtccctatctgttctctatgttctaggccaagatcatcctaaatacagacacattttctcacatatcttagtatagttacatttgcatacaaatcacctttaggagtccaaagaaggtgaatatttttctgacatccnttatcaatttagtgatttaaatgcttccatatttttgctctagcattacaaaaccacttttcactcactttttgtctataggaaaaatatccatttccctgtctaattaaatgaaatcagtcatgggaaaagttcttaataaaatgcaaaacgctgtgaagactagagagagaaattccatcttctgtgaggtctgggtccaaactttaggattcctttctttaggaactgacccctcatgtggacttacttctaaataagcccatggtccacatgaaatctaccattaattggtcccatatcacaaaatatgactttctctttttttttttttaaccagaattgcatataggtataaggccaaaaaaaaaaataaagtttgcttattattttaatttgccagcacttctgaatcatttatctttaaaaggagaataactgcaaacccatggtttagtttttaaatgcaaaatgtcaaggtcttgccaatatctaggtactctccaaaaatgtatcccagatctgtgattctctctgttgtggaactcattaataaagaaaaattgtctttcctgaaaattggctgatgagatcttcagggtgggtgcattttaatggagtgctaaactgtaaaaccccttttcatgtcatataactgtcatgtggaaagcagagttaacaagaatcaactgacttaagtacacataagaattgaggagagggtgggtctcaaatatatacttgttttaaattaaaaatttcacataattattaataaatgtcaatcagagattgattcacagggactattgaaaaaacttgctgaacttataattttggatcaaaccaagaagtgtagcaagccgtattaataaaaagtctttttctccatctgttttgttattgaattatatatgcaacacttgtgaataatctagtgcctctttctgacacgttaatgcttactctatttaaatatgctcataaatactaacatggcagttgagaaacttgaattaggcaagtgagacttccaaaacatattagaacaaatagtgaatacagaccagtgagcaaatgcatacattttattggagacatgagttttatcaactgaatcaagaaattcaagaaagaagtttgtcacgcattaaatgaacacccattttagaaggtcgcatagcataatagcaaagcatgtagacttggtgtcatatagacctgagttttgaattcaggccctactaaagtgtaactttgtgtaatttatttagccttctaaaatgaatcctcatctctaaaatgtggacaataactgcccctactccatactgggtatgtgtattaactttaagacgtatacttttaaaaagcattgagtacattgtctgcctcagagcaagcactcaatatgtagtagccattattattgcttaatggtctgcaaaaaacaaagaatcctaaatttccattaagatcccattgtagcttactactttncagagtccttaagtaattacttaattcatttttaggaaaaagtgtttgacttctaaataaaaaaaattttaaatgaaaaacatacaaatttaaatgtaatatttgaaagcgaaaacactgaccactaatattcatctctgatgtagttagcatttcaaaaaatggtaagattgttacctagtggctaggttatatcaaacccaaaaccactcctgttttgctttaaaaatatacaagtttcttttgcttgaaaatattctgtacatgttcttcttagaaatctggctattccctttactatacaacctgtaactttattgataaagccacacaaattaatttagggggcaccagtctatctcactagaggaggggatctgcataaaataatgcaccgtgctcatattccttttggaatcaccattcccaatctcttggtcactccactattgtaaacagtaaatttgccaaacatgtaacaagacaggatccttaataccaggaaaactgactcatgagcaagtaagaacacttctgaacactttttttttttctgttggcttttgttttgtttgcttacatttgttttgtttgcttacctattcatacccttcatttttctaagaagaactagagtaaatgcttctaaaatatgttttcaagcatgttctctatttggcaggttggttactggaatgatatggataagttagtcttgattcaagatgtaccaactcttggcaatgacacagctgctattgagaacagaacagtggttgtaaccacaattatggtaagtgttggtctatgctttatggtgttccgttttgtccacaggcaattttaactccccagcgacggtgaacagggagggcaaagctgactgttagcaatggtgacatgggtgttctgatccacaaaatcctattgaggctttgaataggttcatcctaagcttcgagttcatatagtacttttatttgtattatcttttgtcacattgttgttcttggaaaaatgctcagatgttaaaaattgagactgtcaaactctagttggaaatgtatgaaatgctaagaccctaaagcacaaaacagtgaacatgccaaaggtcaaccaccaatcacataaatatatccagtagtaaacatattattattgttactatgtttttaaaaagtcaatgtaataataattaatagtgtttaaaattataattttcaggtagttcaatcatcggataatgatttgtattgtctgtttacaatagtgaagatgtgactgtgaagattttaatgagcatgatttatataactaaatgatttaggaattaattttgttttatttttattttgaatgagaaaagggttttcttccaccgattatttttctcattaaccagtgagaagtacacattatagtttattgaacttctaaaaattaagaagaatacgattgcttcatttggccacatcaaaaaatgaaaaatcctctaaattttaaggctgctttttcaaagagattctcatgaaattaccttttaaataatagaatatcttatatatttttctcttctaaagtcaaacatgccctttaaagtcaatgctagtcaaaagagatcaacaatcggtgaccttttctatctcatttaaagttatatatactcagctcacgtctctttaggcaaaacatattttaaatctttatggaaaccttactctaaatacaatggaagtattttatgtaatttagtttttagcttttgtcattttagtttcaggtttttagtaatgttgagttgttcccaaaagtgatattaaggttaaagcatgaaaatgccagagagaagccttcatatgttgtacttagttttaactgtgttgcatcaccagtcagtaatttaatgtaatctgacaagccttcagcagaagtttatgattttagaatgcaaaccaaccaacagcagtttttgcgtaaactttctaacttaattgtgtaatatttgcatgggacttgaaaagcaatatatatatatatatatatatatatatatatatgtttcttttcctaaaaaagacacagtaatggaaagtcatacttcagtacagtcctcctcttttcagcctctgatgaagaatcctattttaagaaattgatcaagaaagaaaagagttccgcgctgttcgaccattcctaactaaggctcaagtcttgttctccagtgtagtaaatttaagcttatttttcatgtgggattcttcttggatgaccaactctggactaccagaaaaaaaaaattttaagttctgtgacttttctgagatactagaacaaaagaagaattaatcttcatctttctcaagaaatagatgttgacaaagaatcacttagcgattctgacatatcaattcccctatcttgaaatgaggtcactgtatgtaaatgatggaattatatcactccatttccaagggtagattttctataagtaaatatctcggaatttgtgtgcttgttttctgaatatatacagttgttttctttaaagatctcttggaattttgcctgttctgtgtgaaataaagtgttttaatgtgcattataggtatgatatagagaatctcctttccatccttgttactaaagggactggacaaataaatcttaaaaccaaaatactgaattaattttgcaagcatggctagtttttaggaagcatgctatcaaaaaaaaaaagactaaaaatgactgaaaaaatccaactgttttatatatatataaatatatatatatttatatatatatataaaggatattctgtaaagttatatgttgtttgacagtaaagccatcaatatttttgctatcaaaatagtataatactagtatctttttgtatgaaaatgtaatctttatataaataatacctctgatatttgcaactgcataatcgttcagtaattcaaaaagacatactagaatcctttttctgaaagtgttccttcaatttgcttttgttgaaaacggtagtccaggacctatgatatccctccacttcattcattatgaaagaaatcccttgtagataaacaagatattggcatctgcatgtaattatccccagattcagctgaaaactcccaacacagatggaattggctagacattttaatatatgtgatacctatatctagatatagaaggctgagagtgagcactggatataattcattttgattgaaattgatatggtgttattgttcttccagttgtctgtcctttgtgtatgttcttatttatatgttgatacactgtaacactatatgctattgctaaataaaattgattgagaaattcagttattcataaatatttattgagcgtctgctatgtgctaggcacagttctaggccctggggatatgtcacagacaaaaatcctgcactcaatgaaacttatagtatattgagagaaagcagaccagaaacataattaagaattatattagctatctttattaaatataatgtagtgttagcttttatggctgttgaaagttattttttcttgtaacagtgttgtatatctacaatgtgattttcattttaataatgaatttattctacctgaatataatcatactgaatataccacagcaaaatctaatagaaaataaaattaatatcatcatttttatctttaagtcttgttgactaaaaatgttataaaatcaataaaatttataagactgtgaccatattgatttaactttttgtattaaaagtaatcatttctgcaaataacccaaagaagccaaatctattccatgtggtttggataaatacagcaattgagggaaaagcagtttacagtagatcttgggagaagggagggtgctgttttcctctgtaatctaactactttcttggctattgaactctctggaaaaggggagataatacagtgatgtttcagacaagctccttttttccccaaagctttactaccgaagttaagggatgcttatgatgcattgctcaactacaaagattttcttaccatctcatgaacacaacaatcctttaggcaaattttccataaaactaaatttattcactccagtatcagaattatgttacaaacctaaaagcaattacccttatcacacatgatctttccagaggttattttttgtactttttataagatgtttgatattttttcttctctatgtaaaattctgtagatgcactatacatatatatgtgcattataataacatacacatgcatatttatataaaatgtattatatatatatacagacatacatacagaaaattaaaatgtattttcttccttatacaaaatattaattttcctatttcacatcactcactgaagagcttataaatcagttagtttttaaataattttggctaaatttaaattttttcagccattagatttactaattttttttctgaattgaataataatatcttaattttcacttttaagaattttatccatgggataaattatctacatccattaagattttttggagaaaaccaaatatccacataggaaacaacattggttaacactgatctcattattttatcaactttcaatagtaattgtaataattatatttgtaatgtttagaaaattttgaagcctttctaataaatattttgtttcgatagttccacttttgctaaatgcaaataatccagaaaaatctccttggtaggaaaattatattttattgattaaaaatcatcataattaatttacataaatactttcataaacaagccctaatgtagcagctttaaacagagagtgatttatctcctgaaaagcagagcagatgtagaaccccattcattagagaagctatcttaatatacaactcatattcactaagaagtaatacattttaaataacttttaagaaattactgtcctgcaaagcacagtagttgataataatcatggcaggttgtatacataagacagaaaaaagaggttactctatccttctgatcattccatttttattcaaaattgaacacttgggaattcataaggctgttttacaaagataccccacaaatcctccttaatgattttctggaatttattatattgaaaagattttgtattttcttcccccatagtagccccctacctttgtattaactctaatatgaagtgtttgaagagctacttgcagacaacttgccagattgagcatgggggaaatgaggaggttgggcgaatgttgagtatttgctactcttttggacttgacatgaaaggaaagcaaagcaaaatgaaacacagtcaaagaaacagcagagctgagcaaccatgggagacatcgttcaaggaaagcctagccgttctctcctttaaacctccccacctccctgggtgcgatcatgtcatttctcttatgctgtctgcatcactcatcttgaatctcagtaattgtttatgcccctggataggcaaaaagtctaactgcatttctaatcaacatctgcagtaagctgaagccttttctagtctttgttggtttgctcagcaggaaaacaatgacctgatggacccctgctgtccaaaataaaaaagaaagaaaaaactgaaaaaatgaaagacattagataaatattttctcaaatagacatgggcctgcttcagaagagataacctagcgcttgttaatatttactttcctttagaaaacctgaatcagaatttctaataaaattactttataaagatactatttaggaaacactgataggccaggatatctttgtatttatttagtgccttctatatgccagacactatgagaatacattgaaaggtttttatctacactgtttacatagaagatcatatgaagaatttcattaaatgaatttcataaaaatgcagaaatgcatttctttaatcttgttccctaagtcatatgaaatctcaattaatgatatatattttgataaatgcaataagcgcttcaaaattttccagatatttcattaagtcatatggaatctcaattaattgcacatattctgataaatgaaatagcttcaaaaatttccagatatttcaaaatgtagggtcggccaaactcagcggctcacacctgtaattgcagcacttttggaggccgaagcaagtggaccacttgaggccaggagtttgagaccaccctggccaacatggtgaaatcccatcactactaaaaatacaagaattaaccgggagtggtggtgtgcgcctgtaatcccagctacttgggaggctgaggcaggagaatcgcttgaacccggaaggcagaggttgcagtgagccgagatcgcactactacactccagcctgggtgatagagcacagctagactgtctctcaaaaacaaaaacaaaacaaaatatcaaaatacagggtcagttcccacctctttcacttgttagttctgtgaaattgaacaactggcttaacctccctgagtcttcactgtcccatctgcaaaatgggaaatgcctacctcaatgtgccagtgtcaaaagtaaatgaaaagacatgaagaactttacattgtgcccgatacatagtaagcactaaataagtaagagctaccattgtttttcactgctatattttattattgttccccacatcttatactcctttgccattattacaaaaaaattatagtgactttgattgcaagagatcaaggggcacacttgacttatttttgtgtccctatcacccagcaaactgactggcacacagtagctgcttaataaatgtttgattaaataacaaatatgtagtttttattgaagtaaattgttcattatgtaatgtagagggcatttagcaaattagattataaatactagctagagaaacttgcacacacaaactaatacagtaatatatgtacttgagtacaaaaattcatgtgttcagatattgcagacacttgtgaattgaccttcaactgtagtaccaaatggagcctttgctataccccttttgaaaaactctcaaacttgttacacttacagatagtagttgtacagccatttcaatctgaatttaagcattttgcatatatgtggctcttgcttttttctaaggacgcttccatattttaaaaaggttattttaaaaaaaagagaaaatataagaattagctcctaataactattaatattttatagcatattttagaaaataataatgctttgcaacaattcaccaattttataaccacaattcaccaattttataaccacatttgctaaactctttatattttcacaatgttttccataaactactgcataattttcatctatctaaagaagaggcaattggatgccttacttttatgtgtggaagaactttttacctgattccagggttagaatattcatcaaattaaaaaaagtgggaggtttctgggtcatttagccatgccaacctaaggcaggatttaagaacacagtagaaggaccaatcctggataactgcccactgtagaattatttagggcatctctatgagaaaataaaatgtcctataattcacatgttttattaaatttttaaaaggggttctacatttatgaagtacttaaaaacaaaatcagaattagtgtaggttgccatgttattcatgcaaagtaaattaccttctattatacagttttaagagcaaattcaacttccccaattatgaactttctggggaaaaagaaaagacttttatgacagattaccaaataaatgttacagtacaattttataaaatatgaatacattatctcaataatgttgtagccaaaggtggtcactccttgtctgcaaatgactggaaaaactcagatgtgaccagggactctctccatattatgtgttcaccaggtttatctttggttggtggctttaggtgccacttacaaaatcaagtgctttttgctaaaatgtctctttagtgcatgtcttttaatggtttggtttaagggtgtgtgtgtgtgtgtgtgtgtgtgtgtgtgtgtgtgtgtaactgaaaaccgtccagtaattattagccactgataaactttttcattttatcaggattttcaccataattattcatcaaattttctgtctcacttgcttagaaaactaaatgggagtatcacctcaagtgtatgctcattacaactggaggaaaattatcagcatcactagggaaatgttttataatataattaaatttcatggagcacaaaccatgcttaaagccaaaatactggacaacattaggaaagcagatttaatgcaaataactatttaagaattttttaactattgattcattttttctttgaatgatagtgtaccaagtgcctgctctgagacaagcatcttgccaaacactagagatcaaagaaaaatgacgtaacctttttcttaaaggaagtcacagttgaatgtggctaaataagatgcagaatatggaaacctgtgaccttgaattagtcttttatgaggtgaagctgactactgaataatctttaatttcatgaaatattttagaaatactcatttcattgccaaagaatataatttatgcttctttagataattattaactggcacttctcccaccacagtcatagtgctaggtttttaatactttctcaaatggaaatttaaagatttcagttttagtatccaatgcaaagcaatttaatctcttctaagcatacttatatattcatctgttttattattgacttctagctacaccaaatcagtatgtgtaccaatactaaatacaatcttttgtcaaattctgaaattggaaagttacataaggtttttcaaatgttttataatttctcctttacagttctacttctctcattataggaatccccatatgttatgtacaagaaaaatcatgaaatgtttgaaggaaatgacaagtatgaaggatactgtgtagatttggcatctgaaattgcaaaacatattggtatcaagtataaaattgccattgtccctgatggaaaatatggagcaagggatgcagacacaaaaatctggaatgggatggtaggagaacttgtttatggggtaagcaaatcaacttattgaagaatttacttacatacacctgaaacttcttttcccttgggcacataacaatttttaaacgtctattattgtttaatttgcagcaacattccaagaggcacatacagtgtttaaatctttctctattttattaataatgcaatccacaaacaatgagaaaaactgacacttggtaagatcaaaatcagaaagaagataaaaattcagaatatacaatcctagtttttttaattgacttcaggatctggagtgactattcttttaagtttgatgctgccatgtatagaactacaaaacaaatataatagtaatcttgtatttgataactgtaggaacaggtttccttcaacaatataaagatggtcattattttagatagttatttgtacctccattgtttgtaattactcatagatatcttttaagtaattggtgaggcaatcactatattactttatcctctattaaatattcatcaataatgtcagattctcacaattctgctgaacacagtaaatttaaactttatgcagtgccatcattttttataatagtatacatagcaaaacacaaaagccagaatttattccaaagtgggcctcacatgaaagcatgttatgcgcctcccttgagtgtacctgatattgagtgtacacattcatagctgaaggcaaatacaacataaatgttcctgcctgaatcagagcaatatcaagatcaatgtcttcagctaccactgtaaatgtcaaaatcaaactggcaattatcacatgctagtgatagcacaatatttcagaagtccagaaactaaatctgtagctngtaggaaactctattcatcgagtaaccaatgaagtaacacatactcgaaatgtaatatgaaatttcctaaaagccaacttatatttcaccttcaaaatgtagtctgattaatcctcacaagaccccttggaaatggagaattacacagacagtcatcttcttcagaaaacaataaagatagaaagatttagaacataactgaagtcctaggagggactcactttccaagccaaaacttcaattcagaaggcaaaactgccttctgataaaaaggcagacgattctgcatcttgccttttagaccatgaagcaatgaacattctttgtacagtacagtaaagcagctaaaacctatgcagaatgaggaaattgttagacattatgaagcaattggttagttttatatccataggaaagaattgctgactgcttaggtgaccctaaatgagaaaaaaaaatgcagtttaaaaaatagcaaaatgtattttaccacagagttcatcgactgtttcatattgagctttaaattccaaaggaaaagggtttctaaagcatttgttctttggttaatattttaaacttttgatacagtaagcataacttagatgttaacaatatcgaagttgttggaactactgtaattcatttcctttagaaaacactcttacatatttcatctcaaaaaatcatacttggattaccagttagttatgaacagcataactgacgtgagttactttctgaggcntttgtcatacatctcttctctggagtccctacccactgggcagcccagactcgctcttttgcaagtgttctgaccacatttcattcagggaaaattgtttaaataatgaaaacaaaggatatgaagggagtagcataattagtgaaaaagttatgtcagtcctatacatgtcacaataacaaaaagtcccaaagttatgcagttctcaaagagacaaaagataacataatggttattaatattatattcatattcattcctcagccagtctgcaagtggttaaagactccaatctctgatgcttgagttgtccactcttttcccaaaaggaatcttcttccaggtctcttacacactccacagtctaggtactttccattttggtgtctgcaaagtctatattgtttctcaacgtttttttgtttgtttgttttcctactgcaaacacatacatgagtgcctggttcccagggccctaggtaaaactaaatccattctcttctatagaacaaagtctattatatctaggtgattaactctgcaaaattattaaatttggattcactatatttttttactttactccttgcaaactttgttgctataattgtaatgaacagattgtctgtgaggcatttacatgttatccaacacaccatgtgtgagacccagaagcccagaacctctctcacactcaggtcctttttgctaccatgcctgtgcactaaagccagctcaccctgatttcctgcagtgtgctgcttcagggtcatttccttggcctctaccacacttgggtgtgtgtgtgtgtgtgtgtgtgtgtgtgtgtgtgtgtgtgtgttttagtccaagggaataattctcaaagcacattccatggtccactagcaccagaattacctgtggagacattttacacactcaattttgggaattactgagaggtcatgaaacaatgcacatgcaacatccccgatgttggcagaggaagcccatgtgtaacctatctctactagtctctttctagactctcacctatctctaactttttgaaagtgtccctcattggacatggatgtcaccaccttcatacaacgttcactttctatggcacttagttttctcttcagaaaacacctgtatttctcttcatgtgtctttttaaggcttcttccctcactagtgggaacttgtgtaaattaaaaatttcagaagatacctcacagaacaatgtagtatgtgaaaggaggcatttcaagtaagtgaaaagatgtgttatttatttattcctgttggtacaggaggatgactacttggagaattaacaattttctaacacttcatcatggaagataccaaaaagtgataggagaattatagatactagaataaaatacataatattgataggaaaatgatttttctagaacatgaaaccaaaggctgaaaacacacacaaaaataattttatatggctacaacaaaatttaaaacctatgtattgcaagaaaagaccttgaattaagttatggaaacaaaacaattgatgattagggaaaaaaattgcaacatatatgggaaataaaagtgaatattttaaatacattttaaagtgctcacaaattaggaagtaaaaaaatgaatactcaatatggaaaagtgggggcagattattacagtaatacataaaagaacaagtagctattcgttttataataacaaattcaaattagtacaagaatatctaatttccttccagaaaattggtgaagacaagtaaacagaacttttctgaggtttaaagctgaacatgcctttgcatagtgctggggatggtagaaatttgcataatctttctgaagaaaagttgggcaaagtacattataagcattaaaaagattattactgtttagaccagccattccatttctagaaatttatcttaaataattaaagcatgtgttaggatttgtcctcaaagatgttcatagcttcactgttttaaattttgtaaagctggaaacaatatgaatatccctcaaacttaataaatgattgagtacattttgacatttttccaataaagcatttgcaatcattaaaacttacttttaacttgtatactgaaatggaaaagtgttcattatattatttgagaagagaaaaagaattgtaagatataatgttctacattattcctttttaaaagaaattaaaaatactcttcatagaacaaagtctctcagagtatatagaaagaaaaaacaagagtaggtgatgggaaaagataacatttcctaatgggctgggtcatactaataaaataattaaaatatactgatttttctacagctagttcacatatcacttatgtaacaaaaactatatacataatgatagctatggggaaaataataaccttccagcaatggtctgactcttgtatatatgggcttttatgatttgaacaaagtttattccctcttgaaggcatatgtggtcaattctcagtcacccagggagacgtgactaaaacgtgccttccccattctaaccccccagttgcccttgtagcaagcccttggccactgtatagaaccaggagcctgaggataggtaggagtcattgcaagagtggcagcctctatgtaagaatttgtatgtctgagcatgtttctgactccattttaatatcaagtatattccttttaaaataaacaatcaaaactcccttttatttgtagatcatgcgacagtttagttttcacactacacttgatttcatttgattttagaggtggggtgattgacactctacaccttatttcacttgattttagaggtggtggtgatttaatagaagcagcccaggctcaaatcccagagctgccatgatatgtgaatctcccttctctgaatctcagtttcatcatctagacaatgataaacatatgattcttatgaggagtaaaagagaagctattcaaaatatttagatcagcatcagatcagcatcagccacagaatccctcaataaatgctcactattaccttattaaggcttctaataaataatcacaataacgttatgaggtaaacagggaaaaagtatcctcattttatagctgtagaaacaagctcagaaaaattgctcaaaatgacagaactctgaaaatggaggctagtgccttatgattataatacctgagaaatgaatctactgtttttcaaaatctttttttaaatgaagataaagaaatcaaaatatgtgaatagcaagaaataaatgccaatttccagatttttgtgtgtgtgctgaattggaaaatatcgtcaaacaacggattttcttttatcatacaagcacaggctttatgatctgtttactcatagctggaaaggaataaaaaagaaaagactgtttgaaatttgcaattcataatattaagggatggccaagtaatgaatcagtggcaatgctccaaatgaaacagaaaaggctgcaacatagcagcgttcctggccaggaaattcacaaattcagccatatggaaagactgtcaagtctcctctgcactgtcccagatccttaaagactaatacagtaatttgagttcaagttatttttgcttatccactcttactctgttttctatccttttatctaattacnggaacatattaaaatgttttgtgcaatttaagtaatatcttatgaaaaaattattattcatgtttgtgtctatcactaggcttatacattgttggcactccaaaaataaatgtagaataaacgcatgactggttagctttaaatggatcattccagngctaattgcttcatgaaattcattaacctatgtgtctccatgtgttttttctcttatagaaagcagagattgctattgcccctctgacaatcactttggtacgagaggaggtcattgacttttctaagcccttcatgagtttgggcatatctatcatgatcaaaaagcctcagaaatccaaaccaggagtgttttccttcttggatcctctggcctatgagatttggatgtgcatagtctttgcctacattggtgtcagcgtggtcttattcctagttagtagatttagtccatatgagtggcacacagaagagccagaggacggaaaggaaggacccagcgaccagcctcccaatgagtttggcatctttaacagcctctggttttccctgggtgcttttatgcagcaaggatgtgacatttcacccaggttagtttcaaatctcttaagttcttcactgatttcccagtaattctaaatgttgtgcagattatctctctacatgttcttttcctgaagacagaggactatttgaaacacagaaaaagacttgcaattcccaaatagcaatttcttccaagttagcacaaaatatggatatatcataaatattaactttctcaatagcaaagaaactatgcaatccatcagagctctcaaaaatcatttagtattaatatttcattcattggtttgacaaatggaaactggaacctaaattatagaacaggaattcatttccattttgtttccttttaaaaaacaaacacttttgctattattgcaattttttcctactattgttgttgttgctcattttcagaaattaatgttggacttaattcttatctcacatagcttaagggagatacctggaacctgagtcaagatagtaggtaccagatatacattgttttatatagcaatgcataaattagctaagcaataggcaaaaagccaaccatgcaaacactatgctagttttatggaaatgtttttcaatatctgtggagtcatggctcccttcctttggataccactaagatatcatttaaccattatattcaccaaaaatgcaggcttcttttgcaagaaaaaatgccttacttttctcatagagaaagtagctgaaggtatgagaagaaaagtatttactttaattgttgactatatattagcatcacaaatatatggatttctttctttatagaaatgtatgctttctcaaaaaagaggcattttgggcacaatgcaatttgtgtttcttaagacctaggaaaattataaatatgtttaaattccaataacataggaatctgacttgaaaactttcaattaatgaactaaaaagaaatcaaagtaagtcaagcaatggcttttaaaagccaggattaagcaaatattaagttaaacccaataggtgtctcttttataatagcaagtattataataagggagtattttaactttggaaatgctatgaaaaatatgaaatcattcttcaagttttaaaacaaatgttttacaacaatttgccccaggaattttaagtagtttgatggttacaataagtgagttcaatgatgaacattctctggatttttttactcacccccttctcacatttgctctgcactcacactcacccacacatccttgataccagagaaagagtgaaaagagagaaaatcgtatatgagtgtgtaaagataactttgagacatggttcaacctccacttagctcaggaatggactatcaagcaaacaaacaaaaaaagcctcaactatggtcacttcgagaccaattctagacgctcttcgggtccaatctcaccttggcctacatcccatcatcctggcagggctctgactgaaggtaaaacaagttatttcctttagtctcagaaaggtatttacaaacttgcatcaaatctaagactgcagtcactgttcataggtattgctaatttatgtaccacaaacagagaaacaatgctgccaattaaaccatgatactatattttatctcatcaaccataggctgcatcctaatttcagagatgctaagaaatgagggcaggagagtattaatgaattcaactaagtattccccttgagcagctgaagaaaagctattaagttttacatttctgccattttctttaaacaataaaaaggaaatggttgtcatattttcagtggcatttatatattaaatacaccatagaagacatcagattatacagaaattcagaatcattcttgagcagactctcagaaaataaaacaatacttggcaattgttatttttaaatatgcatggtgaattgacggtatttcttttctttctctatgttggttaaagaaaggaaaatgtgcattattttatccatgtttagatccctctcaggtcgaattgttggaggtgtttggtggttctttacactcatcattatatcatcttatactgctaacctcgctgctttcctgacggttgagcgaatggtctctcccatagaaagtgcagaagacctggccaaacaaacagaaattgcctatggaacactggattcaggatcaacaaaagaattcttcagagtaagttaagggaaaaactaaaaatgaaatgtttatcattttgaaattcaggcaatttttccaacaattataccatgggctttagctattataaggtttacaaacacaatagtaatagctatgtttaaggctagtacttctaactggattttataatcactttaatttgcaaaaggtaattgacttattcatattgcaagaggaacactctctaaggcatagtaacaatgaaaaggtaattaaaacaactttataacataatttatccaaaacattccaatgttgataatgctatgataatattggatctggtaagattggatttatgtctgcttttgggctgagagcgtaaaaatgaaaacttgacgtttgaagaatacattcaacttgctgcgtttgaaacacaaaaccttaattgcagattatactacttatatgagttatattattctataacctattctgtaacaatgaacttcacagcaacatatttgctttctcacaaggtaataacagcaagaacttttccattctaggcccctctctaggacattgtatggcatttagtttgtgctgatttctctgctttgcagataaaaattttccaactgatataattgtattacatatatggatacatgtataattgcattatatatatggatgtaattgcattgtatgtccctttgaccttccatcggaacaatagaggtttttattttagttttttttagtgtttgttccattatggggatgaattttttttatcaaaaaaccctttttctagtctttttaaatccagagctatacatttggtaatgtctgataacagataggcattcattttgtgacttcaaaacccaaaaattaaaaagttcgccagagtgacatttttatgaatatcgaactaggtaaaaacgaacacattttatatttatgtcaattgtttaaacactagaatatttaatagcatagaagacagaacatatattttattactttctaagctttcatgggaaagtagtaatagctctttgttcgtgcctacatacagcacttgagagattacatttccattttaaatgtatttatttataatcttctcactcaattcagcttaacaattataaacaacaaaatgtgctactccttaggccagctttaacttttgtatacttgaatttctgtaagatatttatcctttttaaagaaaatttgattatagtatcctaatatactttagatgtttacataatatcatatcaagagcaaatcactcaaaaactcaaattcatccctgggcattgtttagaaaagaaaccagacaatgaacaatgtacttgtcaacaatttggagtattattaggtataatctaagatgtataagttaattacaaaacacttaatagattttcttaaaactgtaagtaatattcatgacagtagatttgattaacaatagtctatggataaacttgattaaacaaactttttttaacttacctagcacatccctatttctacagcttaataatagaaacattactactctaatgtatttcagcataatttcagtaccgtgctgccggtttataactgctcccatccatataagtaagcacgtaaaatttaacgatttcgcctaaaaattactatgtatatgcaccaaaataaaatacaagtttgtgctatcatttgcactttactgaaaattgatgactgattgtcatttaaataaagacattatttgcaggctcatcattctgccttgagtgataaagggaagaagaaatgctatattgattctgtgaaaatatttcaaaagtaactcactgtaaagctctttagcattaagcacactgaaaatgtgtatatctaatctttataaagttacaaatgcttaaattcaaagaactggtgaggtagataagagaatatattaagagaaatataagaatggggaaacctgcttcctagatttatagtcttccatacaaactgtgcaagcaccattccttgtttcctttctctccaacccaacttcagtttttaaattggaagatttttataatataggtatctattgttgcagaacattctgaactctaatgggacaagaaaataatttcccctggcaacacgctttcaggaatgcataaatttgggttctttgataaaaatctcattcatttcctaccctgtttgcttccctcctctcccatacatgttgacctggtttaaataaaccatttgtctgatgggctgaggaaaccagaatgtgaagggtatttttgtacctgtcaaaatcattttctcataggaacacaataatggtacatctatcagctccactaggctgcctcaggcaatgacctatactcagtgcttcaaaaaaatgccncagttataatcaactgaaaaaagaattaagccacaggggaaaactacatctgaattcaactattgccttngttttgccccattatgaaactttatatacttcatgttttatgtgccatggtgagcctaaatatagaggcatttaaagagtctgtacttgtcacttaatgccagcctcgctgttttggtactttcacattatcacacacctgacttaaacacagtgatcttcatttcaatgcagttttatcctgtgcctgtctcagtcatcagtgaaactgtgaatgcataaatgatgtgcattactatctcagggtttatgatattaccaaataatgcattgatgagctgtcactagaacatcagtcttgccaagtaagctactagaaggggaaaataattcaccggatagcaatgtaaacattaactataacacatgacatttgtacacagtttctattagaagcagaaatggtggaatacttaatttagggaaaagtaaaaggatagcacattcttttaattccaagaattgttttaagcaataaaacagtgttttagatcagatagttccccatgctttgagtttcacaataaagatgaaataaatcgatctgagattaattttctaatttcaaacaataatgacttctatcttttcacttcccacaccacagtttttaaacagacactacagttgaaggttttagggacttaaatgttcctttatcactgtacttgatacagtgacatttgatacagagacctactgggcttgctggatctgcagaaattttcttcattttagcctgtctcatcaaatttatgaatatttgcttgtcctcactccttagcaatcactctcttgcagtcacagataaggcacagggctattacttccagtcctacgccccttgattccccttcatcccattgtcctgtgtatatgatcttatcagaatcagattttctaaagattagcatggtgacaaaccaggctaatttcttttttcaaaaacttgcttttatctttccattttatctgtattttttcatttctagtgtactaaaccctcttatatttagcatagctactctgtggattcctctttcttccagattttagagggattagttcaacttattttgcatttaaggtatacataattcaatgtatttaaacaaatgcagcagtaattttccacatactaatatatagaaatggactattaaaaagtaaaagatactttattctttttaaaaagatttatttgctttaatactatgctgcattctatagttaagtgatctctataaataccaaaccctaaaaacacactttttccattttgctgtgttagttttgtttaactgtcctattcctttaataaaccacttatttgtaactggaaagttgccaagtaattagcatggttttcatattcttaataaattccataaaatagctcaattaaaacaatattcacactgattttatttcttctgttttctatgtcgtgtacatagtaaagtatacaatgtatgtggagctctatacctttttgggtgaaactctcaagtcaagatttaaatatatttaaaaagtagttatatgtttaaaggaagtttaccagtacttctgtaaaaattaaaattatcaatatagatattgagggacaacctgtatcaagtgaatcagagaggcaatatttttcagaacttgtaaaatgaaagagtttgttctctggaacagaactctatttttagagatggaatgaatgaagcatggcaacatggcattcctagtggattctgtacttgaggatttggaatccaagtactcatcagtcctggaaggatatagaatcactgaaattttctaatatgaggattctgttgccagaagtatcctgtcattgcctaaatacacacacacacacacacacacacacacacacacacaccaatcttcatatcatgagatattttttcaagtgttaatagcataaaaacattataaaaaatactaaaagatgtcaatttcccaccttgatatttatcaacatttgaatataagttactggccaggtgtggtggctcacgcctgaaatcctaacactttgggaggccgaggcggtggattacctgagctcaggagttcgagaccagcctggccaacatgatgaaaccccgtctctactaaaaaaatacaaaaattagctgggtgtggtggcgggtttctgtaatcacaggtactcaggaggctaagacaggagaattgcttgaacctgggaggcagaggttgtagtgagccaagagcatgccactacatttcagcctgggtgacagagcaagactccatctgccccctcaaaaaaaaaatgaatatagttaccataaaatatctttttctttggtgttcaagtttgcaaatcagtgattgtgtggtttattagttaggtttcttgattacttatttccgaacttatgaaatcaaaaatttgaatcccacttttattcatttatttctttgtccacctgaataatttgtctttgcccaggtattcaagttatatgttgattagtaaagaactgcctcttgttgaattctatattttggtaaacaaaggaagctcaatgtaaataaatgtacacactactcagcactgagcctcacacaaagacgtaagtctgaatgaggtcttcactttttttttttttggattcagatacaaaattgcagccccttgttattgaaaacaaatgcagttgcaccagacaagattcaggcttttcttttctttttttctttttttttagatggagtctcactttgtcacccaggctggagtgcagtggtatgatcttggctcactgcagcctctgcctcccaggtctgagcaattctcatgcctcagcccccttagtagctgggactacaggcatgcgctgctatgcccagctaatttttgtacttttagtagacacagggtttcaccatgttggccaggctggtcttgaactcctgatctcacatattgaactttatgatcaggtgatccacctgcctcagactcccaaaatgttgggattacagtctgagccacggcacctggccagtgctttcctatattaataaatatatcttttggagacatttcagttcactaaaaatgtgcgaatgaaaaatttaatgcaaatgcagataacaagaaaaaggacctgggtaaattaagtagtgagagtaatgtattaatagatagagctcaagtagacagaagtaatttacaaatataaataagtttcttggctggagtcaaggggattagaatgaccaactccctagaacacaaaattggaaaataggaatcacttctctttaaagttcaatatatgttctatttgaaaattttctcagaaaaagtctaaaaatgtttcaatcaacctagagtttgattcttgtgttagggatatttggtttgtaagctataccaggttttgcctcttcctttggtgttcaattactgacttgatatggactgtatttttgtatatatcttactagaatcatgtacactaaaatttgggggcatgaaaaaagataaaaataaaataacagccagacatggtggctcacacctgtaatcccagcactttgggaggctgaggcagtaggattgcttgaggtcaagagtttgagaccagcctgagcaacataacaagatcccatctttaaaaaaattttttttttaattagttggacatggtggcatgcacctgtagtccaagctatgcaggaggctgaggcgggaggatctcttgagcccaggagttgtgggttacagtgagctatgatcatgtcactgcactccagtctgggcaactcaggaagaccctgtctccaaaaaactctaaaaaaaaataaaataaaacaaccctccttgtttgttataaataaaatacagtattaaaaggaattttacaaacttgaaataaaatcttagctttttttaagtttaccatgaatgtgatataaaacatgattttaaatgttcaagtctcttcatggcagtctacatagaaaaaaacagtaatagattactatttaagcaggtgagtgtggtaactgttatggtaagaggtttgggcttcttcagatatcacttttaaatgtctatcatttccatgatttccttaaacagtgttaaaaggcagttttcctatttgaaaataataatattactattatgttactctgtggcaaattggagttagagagcaatggaaagatactaaaacgctttattcttatcttggttcagcgaatattaacatgttgttcccttctttcctgtatttaattttattttaatttcctccagagatcaaaaatagcagtgtatgaaaagatgtggacctacatgcgatcagcagagccatcagtattcactaggactacagctgagggagtagctcgtgtccgcaaatccaagggcaaatttgcctttctcctggagtccactatgaatgaatacattgagcagcgaaagccatgtgacacgatgaaagtgggaggaaatctggattccaaaggctatggagtagcaacgcccaagggttcctcattaaggtgggtggaatagtataacaatataacatgtgttgttatagtattccaccttccctgatgtgcctgagagaattattttgttttgtgtgtgaacatggtatgtttgtttgtttgttttctttttctccatttcatatattttggtcaacaatcaggtaattttttttaattttggaatgattaatccttgttgacatatatctttgaaggccatataaaaaccaaactggttgaacactagctgcttccagtgggcctaaggcatgggtagcatatgcttctttatatctcatcaaatttttttggccaccaatatctacactaccatcatgtcagtgataattctacattttatcatttttttttaattatgcctggccactagtctctgagtaagaagaaattaacctntttctagcaaaccactttttttccatttcaatattttatttattatggcatctttctattggagattatcttgaggttgtattcatgctaagtttgaaataacatctatttataaaagcaatcacagtcagaggaaaaaatgagctctggttttatagtgcttactcaagtcacactcctgcctattttaaagggagtgtggtgtaagtaagatctgtaaaattagacccaatggcaatccaaaaatgcttacagatagacccctgaaatgtggttaatgagcaaaccattacatgtgtggattaagtgagactttcattcttatggaaatattggttaaatctgcccttttcatccttttggtcctggacatagaaaattcacatgtttatgtccaggaggcagaatttcctcttttccttaagcaataaaggctgctgttgaattgatggggctggatcccatcaaaagtgatgatcgacaaattactctggtctcagtgctgcttaggagaaatgtatacaaagcacagattcaagaggaaatcagaatctttgccaaaggacttaaccaagaacctgatcttaaaaagtgatgcctctggtaagccattgaaaagtgaaggtaatgagacctgtactattgcctagtacaaatgaaagcaatataaatattatacttgttttcattggtttcaaaagggtaactgcaatgtgctttgatatgtgtgttggtttgggaagggttgagagagatataagaaacaaacaccagtaatggaaaaggttgtgttaaaccaatatattgtgtttgcaagcaacagtgtaataattagtgaggggttttatagtatgtcacaaaaagtacagcattaaaaagaggtaaaacaaaactagccagtaaagacaaatttggttatggactgtggcaattctgaagtcagacttattaacatacattccatatgaaattgaagaaatgtgcagggagaaagccaaacaaataaattatccataatatattctacccaaaaacaatttcaactattcagaaacttaaactggcatcaggttgtttcatctttgagggtttattttgtgtgatgcaatatgaagaatatataatttcaatgaggccaagtagtaaataaatctctgttgaaggcgtggtttttgagagcaccttagcgtaaataattttttaaaaataggagggaaaaatgcaatggtgattgatatgtagatcagtgttcagactattgattacattcactggatgtctctcttgcacttaattaattctctgtggatatagctgccttgtcctctgtcttgtgtctactgataaagtcaagcttcagggactgaatttggccttcagtgacgggtttgcctgactcccattaatggcaagagagttccctcttaaatgtgccactttgtcaaatccacactacagggattgtttggggaaaagctgaagggcttcatctgtccagaactgtataataatcacccattggcttccccctcttttcctgtccttccctggaccttgttaatgaggcaattgttaaattcagcttcctggatggagagtttgtttatgcactttgttttatatatgccacaatttcctgagcaagctggctcctgcctgccaaaaccgcagtcattttgtcctgcctttgagaacactggaagggcactgaaggctgaccagcatgcacctcaccccacctcctctctgtctcatcctcagccatctaagcgggagactcatcaggcttaaattctcattcttatccaactaggattcttctgcttcaaatgaggcaaactaatacagagatggactaatagtcaccttctgtataaatgatttagtttgtagaagcaaattcaaaataattgtattcatcagagcaaggtcgagagaacatacctgtatcaaagtctttgaaacctttctgtcttattcagttctgtagagacttaagtctgttttccaaaacaatctatctttttttaatcaggtctttaggttaatagttctggatgtagtgagacttttgtattgccttgtcattaacaatggctttctcacaaactctgctattcagattcattaggcaatgtcagactttaagcaaaagaaaacagtaatctgtccttctatttacacttaaacagagaatgcagacaaatgactagttatgttccattggtctagggagttttaaatttccaggtcttgctgtatgtttaaagtgcttcagaaaaatatgtcacagaaaagaggagagagtacgatatataaccagaattgaaaattaggacttgggtatttaatgcagactttaaaacaaatgcaataaggatcatctcaaacagtagatctgtaactggactgaaaaatatcacagcaatggtgactagcacctgtccttacagtagagaatgatttacagagctctttaccgttcagactttatttcagactagtgtttgctggacataacacaattaaatttaaaaccactgatctatcacttactaataacaatggccagaaattgttggtttattgtattttgatatagattctccagttctcaagtgacagaacaattccaggtatattgatctggaatctttttttcacatgcacagtacaatttatacttctatcagtgccatggttttctttctcctccctttcccagtccccttggcaatccgaaacaattgtgaaaacctttctctggttgagaaatgtccaaagattgttttaaaatatacagtttcgatggcattgcaatggaatgtaaagtttagaagaaagaggaagtatatttattttgactttactctcaatactatcaacactatcaactttaatatacaagttgattataatatagacatctactatactatagtatttatggtataataaagttgcatacattactgtcaaaatactatcaactttgctacagtatccatactacactggttactagactattgactttactatgtaataaataaacctgttaaaggttctttggagcgaatcatcattcggttgacatagatttactattaagtagctgttagatgagaataacccttttaaagatattcatagtatctagtgtctgtaaatacctccggacaacaaagcantgagtcatatctgaacacttcctctggcgcttagaatgatttgtatacttgaccctaatgtttgaagccaagttaaaaactctagtcacctatacttttattattcaacagtgataattctcatccaaactttgcctcctctaaagaggtttgtggaactgtgtctaaagtaaaacaaatgttctgtcactgaaaaaaaataaaaataaaaagatgctttaaaagaaagcagttccaatagaacttgcttcagggggtgagacctggaaaaaatgaggcccagttgtacttggcaatgccaaattgcaggaacccatggcaacaggaaccgatccattgaaaccaagcacatcatgtttaggttacaacaggcaactcagagccccacagcaatagcacggcagggggaggaaatactcagcatgggaattagaataccacatctctcattggacttttcctttcagtattgaacaaaactactggcctcataagacacttggccttagcctagatctacattggagtgagtagagttctatgtaggtcaaattatttttcttccactttagagaatttgctggggcaggtgtattaaacttagtatgcaaattcatgtgtgaaaaatgttattatcctaaggagctactttcacatataaaatttgtgggatatatactttagttcaggagtacttagaaggtttgtgaagtacttagacggtttaggaaaaagcagtttgctggatattttgtgtgagaataatattttagtctttttttggtattataaacaagtcaactgatagtatttaaagtagatactagaaaaacgtaaacgtacagaaatctaaagctgagtactgagtatactttggcctcaaatgaagaaacttttaacatgcgttgtggaaattagttgcagtgggttggtacacaaacacatttattttaactattatgaaaagagatatatctttgcttatgaatacccttcatttttagtgccatattaaaagatgctatagataacttattttttgtaatcccattatattttgagatacagtctgttgggctaaggattagacaaacacacacaacaaaaatcatttgcatctctcaacatacacacacaagcacacataaatcttttctgagatatgcttacaagagctacctagtttgctattaagtatactggtgtttattgtgtgtaccaagtattttgcatttacaaactaagacatcgcatggtaaaggtatcaatgccacttgtgtcccagggaaaaataattgcacaatagaatctatatactgcattcctctctttccagatgttcactacactaggaaggatgaaacttaccagggccattttgaattctaaatttttcatttaaatccttcctatttaattaaaagataactaaaattacaactcctcatgaagaaggaaacaaacgttgctttttttctacatttctttaagactcacaaggcattatacatgtttgtgattcttcccattagttaaaaaaaatgctaaaatgatttgccctcaatcttttgacagttcattcaacaaatgactcctgagtgggttccaactgagaatttatcagtattttttaagtcgttcattcttgagatgctttatagcagcctgagtaggtaacaccaaattgaaaagtttctatattcaagggttagccttttgctctccttaccactacacttagaagttgtattttagtaactttcctgagaaaatgagtaatttttggccattttagtttctcccacttcaaaggggatcaaatttgacaagataaactgctaccaaaatgtttggcagtttacttagaagtaaccaaagtagatatgaatgcacgaagcttccgtgctattccctttctatttaattggccttgatttcctcattctaagcattctctggacccatatttaaattctcccagaaagatattttttttgtttctgctgtgcatactatagattctgaccatggtggcaaagctactcttcagccctgtctatactaaattattaaagaaaatatgtcagattaattactctccactataggatctcaggttataggatcatgacttctataaagtggcttacattcagttcacgagtggctctcaatttatcttcagaacagcagcaaaagtcaagtgacatattcgctattgttgttgttgtttgcacatcatttgtgttggcttctattctccagattgacgttcctaaaggaaagagtgccaggaagaaggcaccctaggtggcctcagcacaggctgagcagaaggaggaaccattaccttcttctgagagaccttaactcttacattcactcttacaacaggccaagaagagaagcattaaaatcacaccgcagtggattcctccccttatgatcccagggccctcttagctgacagcgtggtggtagagtacagaaggactgaagaacagaggaaggcactgggcacagtggctcactcttgtaatcccagcactttgggaggctgaggcgggcagatcagttaaggtcaggagttcgagaccagcttgggcaacatggcgaaaccctgactctacaaaaaatagaaaaattagccaggcatggtggtgcacctatagtcccagctactcgggagctgaggcaggagaatcacttgaatccaggaggtggaggttgcagtgagccaagattgcaccactgcactccagcctgggcaacacaagatccagcctgagcaacagagaaagaccctgtctcaaaaaaataaaaataaagaatagagggaggaagtagctctttatatttgcaataggtagacgtggagaatattttagacaaacacatgcaggcacacaacacagagctttggagggagttatggtaatcaggtttaccataaaaatccaaaatgcctataatacaatactataaatagctcactttattgtggatatataatctacccttcagtgaagaattgtatatgatgctgctttaatgcagttttatgctaatgataaacatttacttggtacatcataagtaaataatggttttctgcaaaactgaaaatgtactcctttgtttcagcacagcatatgggaaagcactcatccacaactttaggtgtcattagcttccttttgtctctaaagatagcatcaatcaagatggggctactttacgattcacatttaatttaaaaaaaagataaaatagtttggtagtcatttagaatgagctggagaatagcaatgactctggtttagaattatattctattttaatttcactaaaaattaaaaactgtagctcatttattttaacatttgttcctctccaaaataatcaatcacttaactctgttttcaaaatgaaataacatacatctgagataactgacacaaatatacagtatcgtacaccacctgacaacatcagaatagaaaattgccattcagctcttcaaaaaacctaaccctagtcctgagccttctcagaaacaagcattatgttggttatgagaagattttgtaaataatttttatattaacagaagttagaaatattgtgaaaatattgtttatcctccctagcatcaaaaaagtctttttttatgattgaatgtagtttcttttaaatgaacaaatttcatacttcatgaaaatctaaaaatatttgttaacagatgtctacagaatgaaatatactttcaaaaactttgtgaagccattttaatatacacctttaacatcacacaattcaaaaataaagaaaatttaaagacacaacaaacatccctagttctaactccacctttcaatgtacacaatgctgaagcattagagaaaactatcattttaaataccatcaaccacacaaagtcgtattatatcctgttgaagtaaactagattttattgagctttctttaatttttttttaattctggtgtactcaatgaagaaattgacccacagataagtttctacagaaatgttaaaaattcaatctgttttctttaagtgctaaatatttgggagttagccagaataagaattcaattggagtcaatcaaacaaatgngacacaaacagcttctgactttcaaaggcaatatgagagtatatagccccctttctgttgttgcttcactacacagaggcctatataaaaactggcaagagctaccaacagggcctctgctgttatagaagagtgattgttttgtatttggtcctgatagataagcggcctctgaatatttcattttgtaataataacaggccaaaatcctattagtaactaagaaaagacatcatcagctccctagtccctaaattctcatcttttcaggcatttgcaactagaaccacaaaaaatcataaaagcattatcagcaagtatacctattttgcattgctagtgcctttagcataaaaagtaaatttttttcttaaaaagcatgaggaaatttaaaatgaaaccntgtatccagagtcctaaaacagtcccctaacctttggcttatatctgaagctagtcagaggtaaatagaattgaataggacccaggaaaagttgacttcagattgtctcccagaggaaaaatggcacaggactaaaacaaaaaaaacagttcatttctactaagtgatacagtaataatattgtataagccatagaattagttaaatacatcatttaattttctttccaaattgtccacttttaaaagattatgcttaaatttggctcatataaacaccaaaaattacagagcagcatatttaagtgaaacaataatagtacagttcagcattatagtttttgaaccacttccacatatatatatatttttcacatggtatgttaaaccctcttatgatgtcgttttattatagaggaaggaactgtataatacacttacggtgacttgcccacagtcctacagctaagactagaaatgagatcttctgacaatctccggtgctcttaagggaagagaacaaaaaatgactttttagtataaacatagattcactctgaaaacttactaaacagtttttgtgatgctttcatgctgcagttttggcaacacataaattcaaggcatattgaaaatatccacatagagttcaacttccataaattttagcttattttaaaaactagataaactctcactgagttgaaaaaattatgtagctttcaggtcaacacaaagaaagattttacaattaaaactgcttcccaaaaatggggggaaattggcttatgatccctgacatccaacttattcaagtaaaagtagaagagattctcacatctcctggacaggaaacagtgatgttgacatctctatttccttcccactttgagagtctgagattctgagtcttaccctaggctctctttaggaaaacaacaaaattctcatacctctttgaagttgcagacacttaataagacggagaaaaaattcaccctcagaacttctataaaagctcagctggttttggaatttaagtaagtcacttctttactaaatagctgcttttattgcagcatatcttcgttgtgaaatggaaaactatttaaggaaagcactcctctgtaagaaacaacatagcaagaaataaatgcaggtcttgtatgcctgtaaaaacagacattcaaaattgtatgctgacatcaaatgtttggcacggtacaaatctgacaaaattcattagattatataaaaggaggaataaaacagcaaaagtgaagcacaggcctataaaaggacttgttttgatttttttagaacaaaacttctatttccatatctaggtatgattttaaaaattgatccacataatgtggtagcctgtggtgtttcaatatgaaatacttgagaaggtgattactaagggcatcgtaacaaccttaacaacttcagcactacctaatttctttttcatttttctcctcatcacaaatagcattcactttacgccctgaagcatgaagacttcacagccactgtaattttacccaatccaggcagtatacctatagttattcttattcatagattcccagatcatttctaaatataaagatattgtcttcaaaactctgtcatataagtgactaccatggatgaaataggtgtttcataaaatacagtttactttttccccccattttaagcacagctttaccatctctgcaggtatttgtttcagaaaaacaggaaatgctctctctctctatatatatatataggaatttataatgtttcatagataaaagggctggtttgtcaaaatagccatttttagaatatttattaaaaacaatgaatgaagttagagtaccaaggaagaacacaaaggaaaccacatatattatagttggaggaattatatcatgccatatttatatcatccaactttacaacgattaaagttcacaggataaatctaatactaaataaatggtaatagtagtagatggagacaagatatcattgtataacatagaatctgtcataaagtgttttttccctgcacattttcataatggctgttagaataatgattacaacatccctcattttgatgtctctggaatatactttgacaaactgagattccaaagtacatccattatctcacctgatgtcattttacttgatgaagaattttaataagttacccaaagttaaataacaatagcacatgatcttgtatgggttcaggctcattcttggtctccactctccttcatgtctcacagaattcaatcaattgtctggtatttgtttttttatgggagccaatcacccaccatctctgaaattatgccaaagggtaactaggacctgattctaagctctgttaattagacagtagcctcaacagagataaagtaattcaaataagaaaacaccatatcagagactacataaatggaaaaaaaaaaggaaataaaaatttaataactactatgtagcacacccatatatactggaatttgatccccctaactccttgtagttgttgcttttatcttcatctggacagatgctgctgctgcaactcgggttaaatagctgatgagtgacagaagtggaactggagcccattactgcctaggtcccaagcccatgagcctctcactatgttgccttgtttctctccaaattcacagaatcctacttagagacaaattaagaaaaaaaaaatctcatctttattcatcctgccatttcccattgtgaaaaaatacaagcacatagtgtctgataatatccatttctcagatgtttttctagctctcccagctaatgaccatttaattccttttttattttcacaataattattgttcatatcagatttagtattgcttcaatcatggtgctgcttgtagcactatcattttactctcaaaaaacaaaagaaggtcagggagatgagctgagaacaccccagcataccccttcttcctaaggaactccaggtgcccaccatgatgcgccctccattattcactccagctgaaaaaattacccaagcaatgcccttctgtgaactcctactctaagccaatcttcaaggtattagagctctctggcaagacagactgaagggcagacaatatttttttcctcttcccctttggcttaattcttaaaatgggttttaaattcaattcagtgaaagccccagtatatcagacatttggtagtgtcttgtgagacctgaggaaagggttgaccagaactgaacttgactttaatacaagaccatgttctattattgtttaactttgggtatttctcccctaggaggaggacagaggagaactaaccagctccaggaccaaggtaagaggggagttttctttcaaaagaatggcttccatccatttgaaggaaacccctcccccacctgttttttaatccctttttctttatacatttatattttttaacccaccagcataaggaaaccagcttgccacttgtgcgtaatagttatttgaacattcacttacaaatggtatagcaggaaaaaataaaaactttcacacaagtcatatcagttatatgctaatgcatttatgttttctatcttcattaaatattagtactagtcttccattaaggcttagatacttgcataggccttagaaaatttttatcagctgttaatttctctatttgtaaaatatacatagttactatcagccaaacaatagtgctcacaaaaatatcaaaactaaaatccaaagcatttttatacagaaatatatcattaagaaaaaaataataaaattaaccactaatatcattttaatgatatatatttggaaatatgatcagtctggacttttgggttgaagctatacaaacttagtgagatttttaaggtgccataggaaaactgtggttagaaaaataggaggaaagggaggaaatattgtgttgagcatcatctctccatgcttatacaccctcttcccaggcctcttgtgtatttcttttaatggttttcactataacctctcactttttgtgttgttgtccatagaaatcattagtatttcctgactttggtattctctttcaaattggtctttccatagaggaaaaccaagaggagaaacaagtgaaagaatttaaaggggcggtgcagtggctcacacctgtaatcccagcacttcgggaggccaaggcaggtggatttcttgagcccaggagattgagactggcctgggcaacatggcaaaaccccgtctctacaaaaaaatagaaaacaattagctgggcatggtggtgcatgtctgttgtcctacgtacccaggaggctgaggtgggaggattgctcgagcctgggaggtagacgtttcactgagttgtgatcatgccactgcactccagcctgggtgacacagccagaccctgtctcaaaaaaaataaataaaagctaaattaaaaaataaatttaaaaatctaaaagttgagctcgaaaaagaaaaatagaccatagggattatgaaaggcaccagcttctagatcctattcagcaataattatctgttatcattttcctccaaagaagctagatcttgtgtgactcaagtagattttaggaaagttttaagatcaggtaacagggacacttgggactcaagaagaagaaaattttaggaagggagaaaaaaatgtaccaaaaaaatgagaattcaggcaatttgttgccaaaaaatagtcatcgtcttccagtaatacaggtctaccattttgttacaaacgtgtttagaagccttgcaaatccttaaagttggattgttagagcatgtaatgaaagaaaatcctttccaaaggatacatttttgttagaggttattgttttctgagcaggaacaatagtggctatgtgattaggaacttacatgaaaagactcattcaaactaagtaattcattttaacatcaaaacataatatctatttatgtagataaatatattataatggtcatcaaatccagaaacttaagcattaaacttttagctcatggcatattttgttgactgattgtctgatataacctaattttgactttctctctcactgacttctttaatgaaaagtacaggatatatttgaatcacattatttattcttaatttatttatcctgaattttaagatgccaggcatacggactctccactgaagcagtcatacaaaagaaggaaattgtcacaacattgttagtgagctctttatgtgttagaatttgatgtttacatggacatttgttatatcaggaagatttgttgtactttgaattcttataaaatacttcatagaaatctcactcagggaaacaattggtgggagttctacagtgacttagctcttttggataacagagcattgaaatgacagcaccacttctctgttttgttgcttagtaaagtgaaaagcattgatttatatacttgcattcaatttattaagtatatttaaaatagttcatgaaagtgtccaaactaatagcttaagatacccaacttctgacaagtagcaaataactgaatgactatgtaatatgtgtaatatgttccagtattaacaccaatagaagcaaatgtaggtgagactattttaagaatttaaattttttgtcactttttaaaatttgaattgtttaaacagtgggtgttagaatatatttctattttgaaatatgactataagccctgttgctttcaaaataagcagctttgtatcttcacttagaatctcataaacttaaaatatttacagactcatggattcagaattcttaggcttcaactattttcagagagtaacagaaaagctacaaattctcacagatgtgagcccccatgtatctgaactttgaataaaaagctcagcttcctttcattagcttgtaatctctgtttctataagaagcactcttagtttgtaatccctatttctataagcagcactgtttttactcaagtgtcttctctactttgtgttgctcatcagcctaaacaaaattcaggccaaaagctctggtaggttaagcaagatcaattaaaacacattttaagtgataagagcaacatccaaatactgacctcctgctaaggaacctgaaatcttaaatgaaagaagaaagttggaactttttatttttaaatttttactctcaagaatttaatggaaaatttatagtctttgtatgtgaagtttaaatagatacatgtggtgagttaaatacatattaaaatatgcagtgaaataaatctcaaaccacagttgacacttaatatctgttggtaataaatgtaatttttaatttttaaaataaaaataaattatattattctaagaagtaaatttagtaacagaataatttttctttctttctttcttttcttttcttttctttttgttttttttttttttttttttgagatggagtcttgctttgttgccaggcaggagtgcagtgactgcagtgatgtgatcttggctcactgcaacctccgcctcccgggtgcaagcgactctcctgcctcagcctcctgagtagctgggactacaggtgtctgccaccacactgagctaaatttttgtatttttagtagagtactggccaggatggtctcgatctcttgacctcatgatccgcccacctcggcctccgtaagtgctgagatgacaggcatgagccaccacgcctggccaacagaataattttctaaaggtgatgtgttttcttggctaaacttgaatagaattgatttataaaaatccattatggaggatttttatcttgaagtttagttaagagtatcacatttcccttgatattaacaacaaagttgcatttgattttatcatttagtgttctttccttgtctggctgcataaagtgaagggcaactggtttattttagctatctataatctcactgaaatatcttctaagattattttgtttatacagtggatcaaattgtcagccattattcataaagatagctaatgtcaataatatgtttatgtccgcttgccaacacttaatagacagttttgaagtgttttgttttaaaacacacttcatatcaggacttcccaaaattcattagttgccttagttgaaggattccctttcgtttgcccagaacactattcttttattttaatgggttgcttgcaaaatagcacgaggttaattcactgttatatcacttcttatgtagttcttgcataacaactataatcattgccctgcattaggactgaaaagagtataaagtaccctaaaacacagttgttaccctccaagagaaagaaaagatttacatagatcgtgttgtaatgtatgactcaaaggaaatatgagtactcagatactagatcttattatttaaagaagaaagagataaacagcatctacagtatctgtgaaatacctcataaagaagattcagatgtattagtttacaaatattagcaaatgaataaataagtcagtgagtgattactggaaaatgttaagaaattcagaaaggctaagagaagggaaaaaaggaattcctggtgaatgttctaatatgagtttggagtcagttctgaataaaatatagttaggactataaggaaactaacctggctgaaggcagagagaatcagcttggaggattagtttgattaagagactagacttctgtgttagacaaacccagcttcctatttcacttttgccatttactagccaatcaactttaggcctcactatcctcatctgtaaaatggagatgtaattctaccatacgggattgttgtgaggattcaatgagaatcctctgtctggctaaataaaatataatacagttatactttaaaagagtatgtaagctgaattgttgagaaagcttgaatgtcagaaaagttagaataatatcttggaggcaatcatgaatttgtgaagatttttgacaaggcattctaaaaagcagtgaagcaaagttattctgactctgggtagcagagaatggattgagaaagccagtggatctggtcttgggtgataaaggcttcaactaaagtgatgccagtttaatagaaatgaaaatataaatatgagagtcacttgtcataaaaacagttcttaatggataattggctagaggaaaggaagggaaatgaaaattcaaagatgagactgagtttttgtggttgggccttgttattttggtattcatttttacagtcctatttcttctgtgtaaaatctcctaattcattatactgaagcttctatatggtactgttcttgggacccaagattacatgtctcaaaagattagaacttaaatcaataagaactttgtatgtatgaaaaaaaagacattttaactttggaagaaaatcttaccatctagttaaatcaagtcatttcatatagatattggtaatgcttttcaaagaaaattatctactacccttccttcttgggtatttaggctgtatctgttcagttgacaagaccacctgcctttcaagttttttctcagctcaaggagtatttagcctgagagaactgaaattgccatcttacaatggcttccaaaacttaatcaggcatagaccctaccaagcctgacaaacttcccaggaaaaagaaaatttcccacagagagccatagaaggatgaatatatagtttagctatacagggaagagtcatgataggaaaccaaaggtatcctggtactgtaggaagaacactggaccagaaggcagaagacctgtgccccagctggactttgatggacaagtcacctaactttcattaggccccagggactgcatcctagggcctaataagaaggatgggcataacctctaacctacattttgattcaaaaattctgggattctaagtctttaaagcaattgatgaaagtttttaggagtcagcaaagaatgggaaaagtaaagatgatctgtggaccatggaatggaattctggaaatcacataaggagatgaagaaatcaagagtaagagacagtgggggagtccacacagcaaatcctggtccaggcagggcatctgcatgaaagacacagtactgttgaacagctcacatgctgtttatgtaacagagaccagttcttatattttaaaattatattttacctactttaaagcaaatttactttagaataataataaccacaacttgaaaaatgaatgctattcagagataacttgaagaacttcactagctaggcatggtctcatttgaaacaaagctttcatatgtataatttgagcacagtgataacaacaagggaatggcctgaggcagggactttactgagtatagtctcaaacaccccaaggccaccacaaataaataaaatgtgtggtatgaaatatgaatagttgatattttctcaatattatataactgaaggcatcttttcacatttttttttaaatttttattggtttcacattcagtatttaaaaatgggagtgggtatggtggctcacacttgtaatcccaggcaggtggatcgcttcagcccaggagttcgagaccagcatgggcaacatggcaaaaccacatttctacaaaatatacaaaaattagctgggtatggtggtgtgcacttgcagtcaatcttagctactcaggaggctgaggtgggaggatcacctgagcctcgggaggtcagggctgcagtgagccatgatcatgccacttcactccagcctgggcaacagagtgagaccctgtctcaaaaaataaaaataataaaaaattaaaatgttctgcatatgatgcaactgtacaatgatcacagattgaggctagtactttggaaatcccttctcaataaatcagtcttaaaacctctgctctattaacattctgagccaccaggtgtcatagaaatgtttttatttngcttacctttaatagacagacttagaagtcatcactatttttaaaataaatgttattcgaatttagaacagatatatttttaatctgtgttcaagttgcccttccaaggtctgtgaacccctgaaattatgtataagtctggggttttgtaagtttttgcatttcttcctgagaaagtatttgtactttcattgaattctaaaagagaaccatgacccaaagtaggtaaaaaaattctactctgtgacctaaaattgacaaaatcatgaagctaagtttcatgaaatatttgtaaatattacctaaaaaatactcaacactaaaaatgtaattaaaattttcattgatcaaactccctagctaatgctctggctaagttcctgggagatatcctaacaaaaatcacaaagctccttcaaggaataacattcctcagatccatgtctcaactagaaattaatcatgcaaattccaatgaacatgcaatttagagacaattgctggaatccagacaagtatctgtgtaacttgttcagctctccttgactcaacttggaatatgaaatacaaaggtttccacactaacttaattacatatatgtcatctaaaacccaaaccaaagacactaaatccttccttatcaaagtagttttcaagtgctcattgcaaatcatgctgggtctgaattgtctttccacttacaaaaatttttctctccttattttaatattaaattcctgatcaatagtaccatttaatgcaaatcttacttgtcatcgcataggcaaactggagtaaaaattcaatatcttttctaaaaactttttgcatatatatgtagagcaatctagcccaaattctgcctttggaaatgagtgcacaaatccaatgaagcaaaaagagccttgtgcttgtctactggaatgaataatttgggaagaaaagtaataacacagctacaagttaaattgaaaacttagtggagcattgataatgctgaaaactggctactcttcgaggctaaatagttgataaagggtagaattgcgaatgcaaaagcctttccttaaaattagacatatttagttcttcactcttcatcatttgacagcctattgattcttatttactttttgtgttttcttgattaataaaatagtcattttttctcagtaggtcattaattgactttacacagagttctggggttgttgtaaattctcagcttttttgcttacttgctccattcacctttatctggaagatgtcattaattaaactacaaaagtaaatcctacatgatatttgcttctctctacctatttcatcttgttatatggaatacgcatagaacttttgtgaaaatactgacaatgcagctatatttaataacagaatgaatagtctatgtagagttggttattcatatttcatgaaattactattttcttattagcatggttctgggaaaactgtagcacatatacatgtatacacatacacacacacacacacatatatatacatacatacacacacacacacatttgctgctaacaaagcttaaatcaaatgagttttccaatctggaattttagtttgatttcaagaaaggtataaaataaatatgtagcatgatagaatataaaaataaattgtattttttaactcctacaaacaaataaaaaaaaaagactttttcttagggtctctaatacttgttagggaaagaacatagttgctagccataaatctgtttttctgaaaacagagatataaactctttctttttttgtaaatagcacactaagcaggactcaaggctattcagtcacattcatttaattcagcctaagggaaaagactcaccttgtctatataaatatgtgtgaaacagcaagtcttctttctaggccactaagagttctattaacctcctgtagctcctgtctgatggggtatgtctgctaattgatgcattgctcatacttctctgcctgacctgttcccatcaaataaagtagagccctcatagaagccaaatacatcacatgtcctccagcctgtgactagagggacaaaaccaactgaaccaaagcaaaccacataatgaggaacaataaatgtttttctaagaactttaagaataacccctaatttatatctcaaattttatttaatccaaaatagagtatattatttggcttgaataaaacaattccataaggtattatattacaaaataactgaaagctttgttttttactaattattacagtatcactttccactgcccagaaaattttgggtgtgtgggggcataaagaacaaatgcaatttaagttcatcatcatcttacacccagagattgtgatttgttgtattttctttcatattcttttcaataatcaacattatgtatatgtatacttatatataaatgtatagtttattctcagactaagatcaaaatgaacacacacttgtttctttttctgcttaacattatactataagtactccctcttgccattgaaatttttttaatggttatcaaacatcaatcatatggatcattggtacttatcaacactataacgccagaagctttgtaacatatggtaccccaatttagaaaaacctgatacagtgggggttaggtctgagcatgagtatttgcaatatgcagttattatactcaagtcaaagttgagaccactggtgtataccaaaatctccttaatcttccctctttttgataggtatattgctttcaatttatatatatatatatatataatgccatataaaatgttatatatataatgctatatatataatgttacatatatataaaatgagatttatcataagtcattttggcagcacctttaatttcttaggattgattgctctaaggggaattatttaattaagggtgagaattgttttaaagcttttgttgtataaagccaaattattttctttttggtttttaattctttttttctccttttttaaaaatttcatctttaaaaaatgggatatatgtgcagaacgtgcagatttgttacaaaggtatacaagtgccatgatggtttgctgcacctattgacccgccctctaagttccctcccctcacccccaaccctccaacaggccctggtgtgtgttgttcccttctctgtgtccatgtgtcctcaatgttcaactcccacttatatgagtgagaacatgtggtgttttgttttctgttcctgtgttagtttgatcaggatgatggcttccagcttcatccatgtccctgcaaaggacataatctcattcctttttatggctgcatagtattctgtggtatatatgtaccatattttctttatccagtctatcattgatgggcatattggtcggttccatgtctttgctattgtacacagtgctgcaataaacatgtgtgcatgtgtctttatagtaaaatgatttatattcctttgggtatatacccagtaatgggattgctgggtcatggtatttctggttcgagatccttgaagaatcaccatattgtcttccacaatggttagactaatttaaattcccaccaacagtataaaagcattcctatttctccacagccttgccagcatctattgtttcctgattttttaaaaatcaccattctgactggcgtgagatggtggtacctcattgtggttttgatttgcgtttctctaatgatcaattatgttgagtttttttcatatgtttattggctgtgtaaatgtcttcttttgagacgtgtctgttcatgtgctttgcccaatttttgatgggactgtttgtttttctcttgtaaatttgtttaagtttcttgtaaattctggatattagacgtttgtcagacgggtagattgcaaaaattatcttccattctgtaggttgcctgttcaccctggtgatagttcttttgctgtgcagaaactctttttttatatacatactttaagttctagggtacatgtgcacaatatgcaggttacatatgtatacatgtgccatgttagtgtgttgcacccatcaactcgtcatttacattagttatatctcctaatgctatccctccccgctccccccaccccacaacaggccccagtttgtgatgttccctacactgtgtcaaagtgttctcattgttcaattcccacctatgagtgagaacatgtggtgtttggttttctgtccttgcaatagtttgcccagaatgatggattccagcttcatccatgtccctgaaaaggacatgaactcatcctttttatggctgcatagtattcaacggtgtatatgtgccacattttcttaatccagtctatcattgatggacatttgggttggttccaagtctttgctattgtgaatagtgccacaataaacatacatgtgcatgtgtctttatatcagcatgatttataatcctttgggtatatatgcagtaacaggatggctgggccaaatggtatttctagctctagatccttgaggaatcgccacactgtcttccacaatggttgaactagtttacagtcccatcaacagcgtaaaagtgttcctatttctccacatcctctccagcacctgttgtttcctgactttttaatgattgccattctaactggtgtcagatggtatctcattgtgattttgattagcatttctctgatggccagtgatgatgagcattttttcatgtgtcttttggctacataaatgtcttcttttgagaagtgtctgttcatatcctttgcccattttttgatggggttgtttgatttttttcttgtaaatttgtttaagttctttgtagattctggatattaaccctttgtcagatgggtagattgtaaaaattttctcccattctgtaggttgcctgttcactctgatggtagtttcttttgctgtgcagaagctctttagtttaattagatcccatttgccaatttttgcttttgttgccattgcttttggtgttttagtcacaaagtccttgcccatgcctatgtcctgtatggtattccctatgctatcttctagggtttttatggcttttaggtctaacatgtaagtctttaatccatcttgaattaatttttgtataaggtgtaaggaagggatccagtttcagctttctacatatggctagccagttttcccaggaccatttattaaatagggaatcctttccccattgcttgtttttgtcaggtttgtcaaagatcagatagttgtagatatgcggcattatttctgagggctctgttctgttccattggtctatatctccgttttggtaccagtaccatgctgttttggttactgtagccttgtagtatagtttgaagtcaggtagtgtgatgcctccagctttgttcttttggcttaggattgtcttggcaatgtgggctcatttttggttccatatgaactttaaagtagttttttccagttatgtgaagaaagccattggtagcttgatggggatggcattgaatctataaatcaccttgggcagtatggccattttcatgatgttaattcttcctatccatgagcatggaatgttcttccatttgtttgtgtcctcttttatttcattgagcagtggtttgtagttctccgtgaagaagtccttcacatcccttgtaagttggattcctaggtattttattctctttgaagcaattgtgaatgggagttcactcatgatttggctctctgtttgtctgttattggtgtataggaatgcttgtgatttttggacgttgattttgtatcctgagactttgctgaagttgcttatcagcttaaggagattttggcctgagatgatggggttttctaaatatacaatcatgtcatctgcaaacagggacaatttgacttcctcttttcttaattgaataccctttattttcttctcctgcctgattgccctggccagaacttccaacactatgttgaataggagtggtgagagagggcacccctgtcttgtgccagttttcaaagggaatgcttccagtttttgcccattcagtatgatattggctgtgagtttgtcataaatagctcttattattttgagatacgtcccatcaatacctagtttattgagaggttttagcatgaagggctgttgaattttggtcaaaggccttttctgcatctgttgagataatcatgtggtttttgtctttggttctgtttatatggtggattatatttattgatttgcatatgttgaaccagcctttcatcccagggatgaagcccacttgatcatggtggataaactttttgatgtactgttggatttggtctgccagtattttattaaggatttttgcattgatgttcatcagggatattggtctaaaattctctttttttttgttgtgtctctgccaggcttggtatcaggatgatgctggcctcataaaatgagttagggaggattctctctttttctattgattgtaattgtttcagaaggaatggcaccagctcctctttgtacctctggtagaattcggtatggttttgcagtggctggtactggtttttcccttccatatttagtgtttctttcaggagctcctgcaacgcagccctggtagtaacaaaatccctcagcatttgcttgtctggaaaggattatatttttccttcacttatgaagcttagtttggctggatatgaaattctgggttgaaaattctttcctttaagaatgttaaatattgacccccaatctattctagcttgtagagtttttgctgagaggtctgctattagtctgatgcacttccctttgtaggtgacctggcctgcctctctggctgccctgaacagttttcccttcattttgaccttggagaatctgatgattatgtgtcttggggttgatcttctcatgggatatcttaatagtgttctctgtatttcctgaatttgaatgttggcttgtcttgctaggttggggaagttctcctggataatatcctgaaatgtgtattccagcttgtttccattctccctatctccttctggtactcaaatcaatcgtaggttctgtccttttatgaagtcttggagactttgttcattctttttcattcttttttctctattcttgtctgtatgtcttatttcagtaaggtagtcttcaaactctgatatcctttcttccacttggtcgattcggctgttgatacttgcatatgcttcacaaagttctcatgctgtgtttttcagttctatcaggtcttttatgttcctctctaaactggttattctagttagcaattcctctaacctttatcaaggttcttagcttctttgcattgggttaaaacatgcatttttagctcatcgtagtttttattacctatcttctgaagactccttccgtcagttctctatctgatcttccatccagttctgcaccctttatggagagacgttgtgatcatctggaggagaataggcactctagctttttgggttttcagcattttttcattgattctttctcatcttcatgagtttgtctagtttcgttctttgaggctgctgacccttggatggggtgtttgtgggggactttttgttgttgttgttgctgatgcggttgttgctttctgtttgtttgtttttctttcaataatcagggccctcttctgtagggctgctgcagtttgctggagatttactttaggccctattcatctgatttgctcctgtgcaggaagatgtcactcaaggaggctggaaagcagccaggatggctgcctgctccttcttctaggacctctcaccttgaggggcaccaacctgatgccagtaggatcgctctggcgatagggtgtctgacaacccctgttggagggtctcattcagttgggtggcacagggagcaggacctattcaatgaagcactttgtcccttggtggagagggtgtgttttgctggggggagacccacccatgtgagctgcccgattcctcagaactaccaggaggagaggctaagtctgctggtccgcagagactgcagccacccctgcctctaggagctcaggcccagggagatgctaattctgtccctgagcctctggctggagttactggagatcctgcggggaagccccgcccactgaggaagaatgggtcacgattaggcctgaagaggcactctggctgctgactgccacagccggtgtgttgagctgtggggacaagtcttgggagtgggctgtggggacaagtcttgggagcaagctgtccagcctccctggctccagcaggggaaaagcacagcctggagctatagaaatgggtgctgcccttcccccacccaggtagtttagcatgttaggcaattgtgagtcccagtactggctgccgcccctcccccaaggagctgaaacagcttcgacagcaggcagcagcagctggtgctggttgcccctccccccgggagttccgtaggttcaagcagattccagctgagaggctgtaagaatctgcatgttccaaggttgggacgctaggccccagtggcgtgggttcgcgagtgggaccttcccatctgtgggttgcacagttccatgggaaaaagcacagtttccccggatgggtagcgtactcactcaccgcctcccgtggctgtggagaggaggttccccttcccggtgtgggccaccacaccacagtgctcttccttctctcagtgggtcatgccagccttctagacaattttgatgagagagagcctggataccttggttgcctgtgaaggattcacaggcttattatgtttttttccgatggaagcctctgaacgccacagcttccagtcagccatcttggccccgcccatccgatctccagtttttaattctatcatcagtgaatgagaatgcctgctcctcttattaaatcctcgactatacaaagcatatctttacttttatctttcctattatgaatggtgagaaatgaatttgcattgctttaatgcacattagttttactccaaataaggcagaattatttttatatgattttagtttaacttcaaataaggctgaattattttatatgatttaaatttcttgctgcataagttatctatccatgttttttgctgactttaaaggaatgttcttatttttacacaatttctttttgtcacacaatttttaagtgtttttaaactatattaagatttattaaggactatgaaaaaacctctcagcctcattcaggtaaatattctggacattttaacacttgatatttaaattttatataatgtagtatgaagagagcactccagtgaagaggtcacaggcctttttgggaccagaagtgttttggatttcagatttttttggattttttgaatatttgcgttacacttaccaccagttcagcatccgtaatctgaaaacctgcaatctaaaacatttccaaaaaacattgtcttaagtgccaacatgatgctcaaaggaaatgcacattgtagcatttaggatttcggatttttggattagggatactcaattagtataactaatggatactttcttataaggataataatccactaacacaattacacagtagttaagacagataaactgcattaattccatatactattgccatcatagccaacaataaagtgttcatcctattaagtgagatggaattgaatgtgtttaaaccagaccaaagataatactgcaagttatttgttctacaaactacatatgtcctgaatatcttgtgggcagacaatgactaaatctaagaagctgtatcatcagtcctttagaacaatgttcacaaatccaggaaatcagaaaaataaaactaaactttactaaaactttttaaatttgccctgtttacttaggttgacattttatcagatatacactttaatacctcaccaacagagaaatcatactgtaagaaatatgatctagaagtaaatatgagtgaggcataaaagtaagcataaaagcatatccagatctatataatttaatgataagttatttgtggaggggtaaagaataagcaataaatgtcttaggctggattaagcatgcttttcacaaggaaatcttactttgcactagattaatgtgcccaaaattattaataataaatggaaaaaatttacatatgttagttcccataataaagctttggttttatatgacatttcaacaaaattctcattaacaaaagtaagtcttaaatgctaggttagtaaagtatggattttcataacctaactcatttgagggaaattccaggaataaaaacttttggaagtttttcagaagtcctggaagttgatcaagtgagcattttcattctaggcccgaatcaaattccctgtcatctcattactatgagaaaagctatttggggaagggattttctcacctagattttcgctaaggcatacaaggcaaaggcaaacacattaccttgaacctatttcagtctatgcaacgtcattgtcaacacatctggttctccaatatggtttaaacatctagaaaaaatgtggtcccttattgctttttcctcctcttctattttttaatggaaagcaattcatttcaactgactttgcaaaagctacatttaacgcaataaagggaataattaatgtaagaaatagctaaaaatatttttcttctacacttatctgcttggcagatcactattacagtgacactgatatacttaatcagggcaagaataccccttagaatcaatatgagtttgtgacatcaattttgaagtctatgtctgaaatatttgaaggggatttcaaaaaaataataaaatgtgctgcagcgagtatctgctttctacacccctcatttatctaacttcttatggcttccttagccttgtttattattacttcttcaggatttcactttcttcttagcttgacaaaaagtacttttcaacctagtccagtaaaatgagtgaagtaattatatacatatatatgtcattgatgatttttattactaataacatgtagaagtgattcattctataaaatagaacagatgtccaaatggtcattatatacgtggtttatgttaaagtttaaatagcattctaaggagccctttagacctaaacttattatgtgagggaattacatctttagttagacaattgtagaaaaccacagacacttttaacatgcacggaaatcttgaaatactatctccagatattgattacaaaatgccttccaacatgcattattaaagaaaggtaaatttcatatatgatggtattaagtggactctattgagggaccacatgtttctggaaggaaaccatgtagattaattgtgaactgggtagtaacttatctattggtccagtgtataaaattacacaaatatatggatagcagtgtgaaactaaactgtttttacatggcctattagatggtattagaaagacaatgttttagaataattttgtagaaagcttgattccaaacaattttctcaacgtaaagctttttttccttatccattcctttattttgctttttagttttctattgtgctgtgaaactgtctttggatatggttaataaccctgttaaataaccctctcatgaaataagtttagttttatcagaggaatggtctaaatcaacacagaaaataattggagtattacttcatttttaaaaatcttcatatgaatgtttaaggctaaaataaaatggattataaaaataattttctccaaaatagagaattttagtagttaaccttaatttattgaaagacaaatttagttcctcacagacacaaaataaattaaaacaattccttttttcccagcagaatttttaaaaaaatagatgtctctatcttcattcctacatttcaatctggtcctttggtgattaaactaacaacttgatattgtcacattaggaagtacatgcattattttacaccactaatgtggcacttacttggaaatgtaggagtagctaattatttaattagcattcagtaaatgggcagtctaattcttaagaagagttaatactaaaaactcttaagtgtgtggtttacttatgagaactgtttactctccaagtggatcagatcatcacaaaatggaaaagcacgttgttgacctgaaataatatgaacaaattttaagacaataaacactttagtaggctaattagtggtaaaatatgcaacactttttattagttggctaaatgtcattttgcttgcaaatcaattattcaactgctatttgataatatggttgctttattttacctataattcatttgccattaagtaatcaccaaactcagtgtttataaaatagcatatcacaaacgntacccaaattccctcagcatatgagccactccttaaatttaacagaaattttattaaatgatggaaaaatctcttgaaatacctattgggtcatttaaaaactgtaacttgaaagcaggaaagaaaccaaatgtatgggaggcagaagcccatgacatgtttttttttgttttttttttgtttgtttgtttttgttttgagacgaagttttgctcttgtcgcccaggctggggtgcaatggcacaatcttggctcactgcaacctttgcctcccaggttcaagcgattctcctgcttcagcctcctgagtagctgggattacaggtgcccacaaccatgcccagctaatttttgtattttttgtagagacagggtttcgccatgttggccaggctggtcttgaactcctgacctcaggtgactgaccgacctccgcctcccaaagtgctgggattacaggcgtgagccaccgcacctggcccatgacactattttttaatcctcctaaagaatagccaaaataagctcccctatttccctttagagaaaaacatggaggaaatctaatctagtgggtttgtttgcaaagtcagtatcacatgcagcatgacatcctggggtttaattacttaaaccgtcaaattggatatgtaatcctaatttccaaatagcattcaatgcctttaagaattaacacaaaatttagatgtaagaatttttccctagagctgctgctgtctcttgactaccatgtagcttctagtccatgaagcaaatgatcaggaaatcctagattctgcgaacaactaaatcgagcacactaaacccacataaaaaataaagggagtaataattactctttgttttcagggaatcagtaaagaaaanttagtggcttgtttgatggtttgtatatgccattttgtttttccttgtgggaatgaattttaatttcattctcttttggatcattggcattcttagaggcaaaggaattcaagacacaattctttctcaattactagtaaattcccgtttattactgttttgccaaaaaaaatccatgtaattgatgatgagatcanttatttgacaataaacgaactgtgaaagtgaacagcaccaaatactgcatgtttaatacatttgaaattagttacaattgcctttggtttggactccagaggaaggggctgcaggatggtaaaatgagaggtttatttagcgtctgggagaagcttataaagagcttaagtcctcattccttctaacatcttaacagctgtgcagtttcttacaaaatatgttttatcgtttcaagaaatgctgttaacctcgcagttttaaaactgaatgaacaaggcctcttggacaaattgaaaaacaaatggtggtacgacaaaggagaatgtggcagcgggggaggtgactccaaggttagcctcaatgtcaccaaaagcgggtaaacagtatgtaaagtaataggtgcatctgctgggagacttatggtttggacctcctaataccagtcgaattgctagtccagtcccttcgcaaacttacgtatgcagttactgtcaatgcaaaaatatttgcaaccattatcaatttagtgacacactaacaancctaatgaaaatagtcactgaaaatctctgcctttgaagaagttgtggatcagacgttataagtctatgaatctcaattttggaaagtaggaagggatgttaagtttctgaaacagcaagttagagaagagaggggagggagcagggcggtaagcctgtcttgttttttttcaccattactttaccagaacttctaccaaatattgcttagtatcagcaataacctgactccacatagacctgtctagggtgcccactaaaaagttttctccatctaaactctcaggttctattcaagttaaataacaaatcaaaggctgtcatatgaactacacattttttgccttccataaatggatcaaattgcaaaatgatcaggaaacaaaaataaaatcaactcagctttgtcttcacttcatatcttaactccagcttcctaaaataatagttttttttatttctaagcaatatctaaagaacaaaaaagtaggcaattaacagaatatgctagtgtcccagagcccttcttcactatatatcagtatttttagacttaaagaaaacagttcatggatgggaaatttctcacccgatctaaaaagcctttcaaattaagctcacttacatcttcccatctaataactagttctattgcagcaggaggaaggacaaacttttgtctccattctaggcactgtcttaaggagtaataacttattttatattttggagctccaactgtctgaaattttctgatagttttcataaacatataaatatatacatagagaaaagtattaaattttatactaatagcctagcattctttcatgcaaattagaaataccagaaaatatcatagaataacaccagagaaaataaaaacaaagatattctattccattagaaaaaatttagttttcaaatttttattatcacaaatacaggagaagtaaaacactgctttacagataaaattttccacaaatataaataatgaagtcccattttagcgtgcattaaagatgttttctggagaaaaataagcaagcataacagaaacatatatatgttagaaaaatctatgtaacaaaagtcattctaatttattgaaatgaactggacaactcagtcagatttaattagcttgtatccaactcattgtttggtacataatggacatttttatttgttggacataaatatttgttgtccaaaagaataaatttctctctaaccctgtagtttccaaagccgaattgcttcttcttatagttatgcagtgacattactttcaccaaacatgaactacaaaatgttttagaatgaacgctatttcaaattttaacaagtaggtttccaaaatgttataaaaaattaacataaaatgttctcccaaaatgaaatacattatgttttattttttcctccaggaatgtgtttgtataccaaaaaaaaaaaaaaatccacgtaggttgttattggtctaaggtttatcaagagaatagattgttgcactctaaatgttaataataccctactctgcatttgtcatacaagatgatattttaaatggcctgacctaacttaaatcgaaataaattactaggagacagttgttgctttttcattttcattttgtacctttttcaggtgactgattttctttgtaaacttaccttacccctcccatttggcctgatcttcatcaaaagatgtaaaataaggagaaaaagtcctgaagtgagaaatgcaactgactctaaagcctttgtgtgtaaaactaaagcagaaaagaccaatgctgccaattcagtgcagaagggaaaatacagagagaactcagcacacacatgctgaaatcctggcttagctgaccttcaaatacagaatcttggtaggagaaaactaactatcccaacagtgactcatctaatgaagaagggaaatatggaaacctgtaccacacntggaaaggtttctgtgagagagctgactcacttgtcattcacaggactgtaacctctccagccttccattcagcagcaaattattaaacttgtgtttgaatggggccatgtgccagtacctgtatagaaacagaattaccactgttctttccctcaaggagctcatgatttaatataaggaacaattagactatttggggtcgctgcagcagcttccctgtcacactccaggccgtgcagtaattagcatccccactcacctgacagccactctcagtgctgtgaagttctgaccatagcagtcctcagccaagaggcttcaccttgaaaggtaaaaaattaacaacagatatgaagaacagggtcctgcatcttacacgaaataaattaaagcagaaatgcatgacttgtggggtacaaattccttcatttgaaaacttgatcctttgatggtgttcatatgagttaatattattgtgatatggtcctgttttatggtcataagaaattcatactcaatcttgggaataaaatagcaaaaatttactacttgacaatgaatgagccaatttaaaaatattgattgcaatgtctaaaatgtattctccactttggttaacctagtatggtttagtcaaagcacaaaccatacaaagaattttaggccaatttttatgccagttattcaatcctggttctagttagaaattttggcaacagctgcaaccatcaatcacccattattacagttacaaaattattttttctgttaattctatactttattctgcttctacatgtgtaaaatatgcacactcataaatgtggatattcatataaaattattttgtaagtgttattataccaaataatgctttctctaggtattatatttggtcgtgcacttcctgataatttggccctttgaagaatacagcccatttctgactttgatagatgctatacttacaaataagccactttcctctatcacagccatgacaaccaatgcaagaataaaggaattagtacagaaaatatgcattcatcagcaggaaaaaatggaaaggaaaaaaagttgtagtaaacaaaaaacactaaaggaatctagcccttggagaatgactctcccagtaatgaattccttgttctgatagtccaccagttgaacattaattatggttaatactaaatatcttatattcaaagtgttaatctaatcctctaaaaccgggttacaggtgtgaaatagcagaaaggataaagaggccagagggaaaaagaaggccataggagaaaagactgctttaagaggggagagagaagcctaatgcagtcttcatcttattcacaattttgccttcaattgtcccttcttgaagaaacttaaaggaaactctcgaactttcctccngttttcagcactgagtcctcctcctcccagcccaccccattcaagaactgaaatataggataatatagtttagcacccatgtgttacaaagnctttggggagcttgcctggggacctaaaaacccttagagtatcagttcaagaaaaaagcttgctctggattcaaaaatcttgctctgtcatttttcaaattgagctactttatagagcacctactctgagtcagctactctggaaaataccattttacagagataaatgagatgtgacttctgctctcaaaggatttgcaggtcactagcaaacccacagttgtggttattgtaacaatcacgtcacaaatggggcttgggggtcaggtgcagagagtagtggttggtatggataggaaaacctagattaactgggtttaaaataaccaggcaccccaattaaccataatcctcaactcaccccaccctcaaattcagcttttagtagaaagtattaaatcatgctcatgtcagattttaatccaaaaaacaacataatattctaggatcatggcaaatatatattacttcttcagtggaacaatgaacctaagccatactaatataacattgaaacaaaatttaaattatatcctgaaaccatataaacaaaaataaaaatttgtattttagaatttttttcaaaactaaccatacaaaaaaaaatgggttttagtttaaccagaaggcccaattaactagaaacatcattttgtgagtcttctgctattaatatttttaattgcaaaagctatgaaatcatactatcaggaatcctgattaggctactgcctcgctgtgtaacttgctgaattaagctccctgtgctttggtttcctcatttgtaaaatgtgaatgatgttagtgaacatgaaaaatgcttttaaccgtgcctggtacatagtaaatgctcagtaaattttagctgtcatgatcaccatcattcttaatgcatttcctagttgtatagataggtttttggaatgaattcccaataaatgcatgtcttgtaactccagatgcactcagcatttcctagaagaactgaggcgcattaggggatacaaccaggcaaaatgtccagaagaatatgaaaagtctgtcttgggatgaaatgaaaaaccaataagccaacaaaatggtaacaacaaaagatcctgaaactttctgctttccattcatcatcttagccttcatattgtaatatgggagtgaaaacggaaagaattattaaattccttggaatattgacgccaggtaatgactgatgtcctcctccctgaaactcctaatataatatttagtgttgaaggaatcaaagatagtagaggagacaaatagagtctctaataaatataaatagagtcttcttataagaggagtttgtctattcagaaaaatcttggttacctctaacctgtctgtctttttttgttgctaagaatttgtggaatatattatagtcacttcaccttgtacttaaagtacattaatatgctttaagattcaagatagatgaaaagataaatagatgatagattcaagatagacaagatagatgaaaattgcttctggtgatattatttatgttaaagactgcaatttagaaggaaagtatcatcatgggcttacgctttaaaataattatttacatatttttctcctgatgaccttcctctgcataagntggtcttttgtaacactgaaatcacccacctttttcaattaggttttggatgaaagcggtcaagaagtcaatttaatgatggatactgtagacatacttttatagcataaagtcaaataccataagctgaatcataatgcatgcaagcaatgaaatcagtcctacctagcttctatttcagtctgtctgtcaacctgcagccacttccttaattttgaaagagaacaaaaagaagcttctggattttgaatggctgccacatttatgtggggaaaatggtaaatgttccagaaacccaaccaaggccaatagttttggattcacagtaattgcatacattttatttaaaaatcctccctagcagtatgtgcctgttacctaaagcgatggagcaggccccagttttatgtctgattctaaacctgggcctacagtacaagacatagcacctactgtggcctctgctctgtcactttgccatgcgattctaatgtagttttacttgaataacataaaataacatatataatgttatttatgttattttccacgtgaagaactcctgtaaaccttgccgttttgaaactcagtgaggcaggcgtcttagacaagctgaaaaacaaatggtggtacgataaaggtgaatgtggacccaaggactctggaagcaaggtcagtcgctgcagttcggggcctcctcttgtgttcacaaagcagtaaacgggagcaattgtcaaaagtatatggaaaccataaaaactgaacattatacactcaaccactgcctaaattaaaagctaatgtcataaatttcaaccatagggatggtcttcccaggaaactgcaacctgctccccaatattaagacttttaaattaaattaaaactgcaaaaattcttaaataataaaattccttttacattattctcaaacttacgtaccactcataaaagtagtgttttttggggtagtttttttgtttgttttggaggcaaagacttcatgaaatcatgttatttcaagaactgatatattctcaaaacaagaaatcagtagtaaaccagaaaaaggagattctaaatattaattaaatgcttactcagaggttcagtcttttgtcaccatagtgccaagcattccactttagtttgaagaacctccattatatttctgtgctgatagagaaacagagtgaacctttcaattctacttgcccaattgaaattgttttaattaatcaatgtttatgaataatattctcaagttctaagatctcttaatcataaattcttttttaaacaatgcaggaaaaaaataaaaaatgcaggaacctatattcctaattctgttgagtacaaataaaagtaatggaaatagttatgtttttattttttaaaaaaattacaagtttatcagtgaatctaaatacctacacaagttgatagaatatagtaacagcacctgaaagccagagctgaagtttcttggaatccccttttatttctttctgtatcttctttaagaaagaaaacaaattactggatattctaagatattaaacatgtgactgctttaaataggagagcctcaattaatttaaggagacaaactaatgttaatgaatccctttcaggccttatccctatattttaatcatttctgtctgccctttaaccagagtggaatgagacaagcttggccagataattaaaccattacctgaaatcctgatgtaaagtcagacaagtgcaaatacttaatgagtaattattttgaaaatgaagttaccctaaaatgtttggcccagtcagttgatgttgtgactaaggtgacagtgtatatagtgcatcttttgagttaaatactctcctataaaactcgttaagggtctgaatcacattttgcacaaaacatactgctgagaagataatgactacagggcatccttcaggtagtctaccaaaatacttcttgcaataacattatgtaataagcatatttataatttattaaacaattttgaattcttgttacaattttagtatcttccaatcataagagtaggacttagggattattntggatttattacgagattatatgtatactgaagctctgaagaataaataatatctctaaaatattaatggactaagcatttttaagtgggaattatattgtatttttaattaataaaaataattatagattcatccatacataaataacttatttctcaattgaccataataatttatatattttttaaagttatcttaaaaaattacttgagttacacatagataattatttctaaacagtatataatatgcaaaagtaacattttccatgagatttcccttgtagatgtaactgaaagaacaaataatgtgtaccttggcacattatttgcatgtatttggtaaattantgatgaacaaaatgtgaaaccatcagctcaacaactccttagttgctcaactaggaaatgcggagttggatttattcaagagaaatctcaaacattaaaagtatattctaatagaagcaaagctaaaagacgtcccctttctcccataattggatttttaaacctgtcattttcaaacttaataataataagcccatttctgccactctatgtaaatatataaatgcttatataaggctaagtataatggttttcattgcatatttaataatgataaaatgttactgatttcattgaatgtaattagatacaatttgttgataactattataattttacttctcccaagagctataagatttatgtttaagtccattagcctacatcagtgacttatacttgtaaatcatttcaggttaaattaagcatttactttcattggctttttggatttcatgtgttcttttaccttttggatgtgacatttccacagttaactgaagtgtctttatccccnctaggacaagacgagtgccttgagcctgagcaatgtagcaggcgtcttctacattctggttggcggcttgggcttggcaatgctggtggctttgatagagttctgttacaagtccagggcagaagcgaagagaatgaaggtggcaaagagtgcacagacttttaacccaacttcctcgcagaatacccagaatttagcaacctatagagaaggttacaacgtatatggaaccgaaagtattaaaatttaggggtaggacttaggcccgactacagtgagtgggggatgcatcctgtgaacgcagtgttgtgacctgtctgtccagtggtggtattgcttgcttctaattagagctttatatttttgaaaacttcagtgcaaattggttcggttttctttggctgcagatgtactgtttgaaactttatgttgccaatagatatctgcattgcaagggtcagaaagataaaaacaaaccagaattgctctgtgaaatgatttaaacagtatattctacctgaaatttggggaaaattggaaattagatctgggcttccttgcacatagactgggcaaatcttttctgtaacagttcaattttagggtaggtgctaaaaaataagcacaaaatctgttccaagtgatcaaaacccagactgttgcctatttttgacaaagtcatattgttttctgaggaccaatacatgtaaaaactccaaggtacagagtatgtgctcaatgaattttggctcctcttctaatttgttttacattagccatcattctacatttttaaaacatgaaatcccactttttatttacctgatggtagtccttgagccagacctttaaggaagagtgatcatcagaattttgactacaattcacatttattagatgaaattcaacttntatgctcaaagtatcactaaggtaaatagacattttaggcaatacagcagtttttccatcagagacgtcagcaatatttgtgtcctataggaaagattcagaaaaagataaaaattgcagtgagtcattacaaactattttttttttcatttccattgcttttaagcaatccaggttagccccacttactcacatcctctcatcatggcataataaaaaattgtaagcattcagtaaaatataggagttggagatttaaaaaaaaatctaaatgtccacttctttcctctagtaataggaagtagctttaaaataagatctgaaaggatttgttattgctcttcctaaaatcaggactctaaaacccattttctaaaattatctataatagctaagtgaataggctgctcagtttcattacaatgataagtgagtctttgaanttccaagagatatttggtacttgatgtaccctagagtcaaaaacccgatatactttcagtaagatgtacatctgagtttacaccagctaaacacgcttgattttttatatttatttatatgaaagcttttgaaatacttgtatcttaaagcaaagagccaatgccatccctttttatcaagatctaattgctttcatccataatgtagaaattagtgactgagtacaatagcacatagatagttccaaaacgattctttccaaattttgtgaaaaagaattaagaactaaatcctcaattcactcgatccaaacatttttagcatgtcttatgatagcaaaactacaaagtgggataatatcaaggtgtcttagccattagaggaatgctttcatcttaatgtttacagagttgatgagagacttttttcaaattgagaaaaacaatacttgattagttttcagagccaattatttggactgaattctgagatgaattttataagatgtccttactagattttgttaacagttcattaaaactgacttttctttggcataacaaaggcactccagccatcatcagcaaggtacaagggtggggaagcaaagcaaataaaaaaagagtattagaaatttttagaaataaatgctgtgtatgctagttcatttcaaagttcagggaagttattaaaaggagatgtaaattcccacgtcatatatatacaatttacatataacattgtttttggagtcacaacttgaaattgaatttccttacatgaattgcctttagaggtagatttgaacatttaagacaaaaaaatttcaaataaataggaagcattcattggacattttaaaagacagtggcatttgggataaatgaaataatctgtgcctgtcaaaacttataagtaagcagtttttattgtactctcaaattaaaggaaaactttcataaactctatgaccataattatggaaatgattggtaattcaaaaataatattgccccagaatcccaaaaacaaaactggcaccttcaatccatggtagattctactaaaaagtgatcatccctcaagggaacataagccacaacaatccaacaaaacccagaccatatgtaaaatcactagaaagttttccagtttgaggaacctcaaaaggttcacatcaagatgaatagaaatggcattttatggaagatacagatgatgtaagtataggaaataaaaatgctaaaacagatttaaagaaaaataagtcaaagttttattaagtaatacacttcattgcattaatctataaaataggagggtgtatttgagattatatggaattgttcaacctttggaagttttcctttccccacaaacatgatcaagaaaaggaagaaaacaaaaacagatttttctggcaaaagccttctgtaaacactttttaaaaattaccaggcttttattaatggtattttagtatttcctcttgaagaaaaattaaaacaaagctaaactagtggattttaacaaataattgtctattttacttaacattaaatgttgaaagggaatctaaggaaacatattcagactttgattttggttttgtttaaatttagtgattagtagatacctatgaattctctggaactacctttcctgaatctcttgttaaacaagaggtgagtggtttggagactctgagtggtttggggactctttcaaagatttaagatgggctaatacattggtttggattagactcgtggatattcatttttcttgttttcatcagcatatgactttatctaactaatataaacttcctaaatctgctcccaaattgttttctttagaagattgtggaaaatgccaatgctgtaactggagtattccatatagttaggcactcactaaagggttctgacccccaaaatgtccatctaaaacacataaaatggaaaagattacactagaaagttatttagcatcttgataccaagtcttgtcttatgtttcttaaatacattttgttgctagattttcttgatataaatagtcctgctttgctaatacttctttttatacacacacccaaaacatatgtactttaatattgagtaggaaaacattcacctccaataacacagtctccccagagtctcacttcaaaaaacaagactattgcagccatgtacacattttagttcccttggtgaaattattctatatgggtgaggttcttgattaagggattctttcaaatgctcaaatggaattgaattgtttcatttctaactttctcactggtgcagtgaaattcaattctgttcaatttaaaatagtgggcaatgtattcatttgcatttttaaggtacaatttacatacaataaaacctaccctttttagtgtacagttctgcaggtttgataaattatgaataattttagtatattattctatcagtttcatttacaagaaagataaaaagtatcttcctatataaggtcattcatccactcaacaaatatttactgagtgcctattatgtgctaaataaaagacagaaggactttgatttcaacggactaatagaagataatcaagtagaagtgttgtttttctctaaaatccttgttatatttccttgatttctaaatataaaaactatacatgtttctgtgaagaccatatcctgagttctgattatgatgataagtattaatttttaagactgtttactgaaacagaactgtgagattgaccttgattttgtcatttatatgtcattactagcaatttgacttcaactttctgaagttttcagagtaactgatctgtaaacatttttactccaccagtttttaaactagttactaatttcattacttaatatataattattctaatatttaagctccagggcagaataaacacagggatggaatttcctaaagatttggataaacttgaattcacaacagggaattagatacatgctgagttgtgagttatgaactaagtcataacaaactcagggaatcactcctttaccctattttcctcttaagttataattctagctactagaaagaatttagacagtgaatgaacagtaatgagactaacataataacagtgcctgtttctcctttgtgtaatgttatctgctatgtaatgtgataaggagcaggaatttactgatttcagatccctgactctataacctcaatatgggaggttccccagtcatgaccattcagtaggctttgaaacatatcccttttcagtgcaccccttttaaatacagttcttaaaatatgagccttagtgtccataatagcatagagtgaactatatgtcactaattgtgctgttctgggtcatgtctataactggtgtgaatgaatgaagtgtctgtggataggtctgtgttataaaacaggaagatctgtcatgaatagtctatacatancgtttgtttaggtacttcattagttctggtagtttaatccttgcactgtaaagacatttcatgacaaggaaatactatttaaagaatgttgtcaaacataaaagagcttttaagctcatccagaagtactaagatatacagtgcagcaagttaaaagatgtttcctgcccagatttactaacagtagttaaatattataattttagaattagtttttccacaagtaggaccacaaactctagacagattcattcttcggtgtagttaagctttcctttccctggataagcagttttcatatgaccaaaagaacatggaaaaaatgcagatgtctaattatttatatttcggtgtttgttgtggaacatattgttgaagaaacagaaatatggtaacactccgcgttctttctgcttcctttccatgcaacccagctgaccttttctgaagccataagaaacaaagccagattatccatcactgggagtgtgggagagaatggccgcgtcttgacgcctgactgcccaaaggctgtacacactggaactgcaatcagacaaagttcaggattggctgtcattgcatcggacctaccataaaaaccaaaaaaataattgagtgccttaattaaactgttggtgactggtggaaacgcagccctgagggacacgccacgcgcgggtctttgctaaaccaatcctttggctgagagcgggaagtccgtcctaacgcgctggccggacatcagcagcagcaacgtgtgcatgagctcagctcggaaacccaaactcagattttatatcaggaaaactcacaattgaggtttttttcggggagtgggtgggggagggatctgggatgggtgtattaacagcaacaaatttcattcgagtggactcaaaaactaatcagacttatgagttagcgcattaaactgtgaagttcttgctcagaaaggcctttgtcttcaccggaaaggataaaatagttgtagaagtccgtgaacatgctaacctgtgtctccagaacatccatatagtccatggaagaaaatccagctgagaaaacaaatcactaaactgtgataagaaaataatgaacaaacatgtaaaacctgtgggaaaaaaaaataaaggaagtatgtacacttactttggagaaaacaaatactgaaacatgcttgctttttaactgacgtaaattcagtagaggacaacacaattcttttttctaaccatcttagggaacaatacattgcaataattgatataaatgccatcactgtaataaactttagagacttttttttataaaagttgttggtcatcttcttgtttgctgtaaccttcactatgtcacatgagtcgattcaccgattgcatttgtctcacaaccaggaagaaaagcaaaaggaagaaaacgtttaggttcaatcatcagtctgcggtgtagactcgaaagagatgacaggtcactcatgttaatggtattatttataatctcattctgtgtacaacattgtggtttttgtacccaccaaaaagaataaaacagcagatgttcttacaatatctacagagcttaaaagttttttcttat

SEQ ID NO: 10 - DNA, 70500 bp, Homo sapiens
  modified_base (365)..(365): n is a or g
  modified_base (8622)..(8622): n is g or a
  modified_base (20526)..(20526): n is t or c
  modified_base (23348)..(23348): n is t or c
  modified_base (27327)..(27327): n is g or c
  modified_base (28940)..(28940): n is g or a
  modified_base (31804)..(31804): n is g or a
  modified_base (33702)..(33702): n is a or g
  modified_base (40082)..(40082): n is a or t
  modified_base (64952)..(64952): n is g or a
  modified_base (70308)..(70308): n is c or t
agatgttcattcagtttttattcttctaaaccaattattccatcgcaatgaatatcatcttattctgaaacataaaccacagtttcttacctgcaccctgagctaaaaagatagctctcaagtcttactctctcctttctcgatacagtagttcaccccatttgtggtccagaagctgtttccagtgatctccaaaggggaaaagtacttccatgatgaacattatgtctataaaaatcaagaaaataagcatcaaaaactttagttttccatgcgaattaaaaaagcagcaacctaagcatttcatagtgtcatgaaggcaaactgcagcttgttttaatttgccttataacatatctgcagtntacctggggagaactgatgttctaatgaattaggaaagcttcttttatctccttctacctgtagcttgaagacctcagcttttaaaaagctgttgatattgaacaactgttaaattggcagttattcacaactgccaaatattggaatttccaatgactactgactcaggtagaaaatagtgttgatacttattaagctttcatgatttacaaagtgttttcctatatatttccacctttaatcttcacaaccatcttacaaaccaggcagtccggaggttattcatctaatttatgaaagcatggaaatgttaaatgataagcccaaagtctcctagcgtggaaacttgttgagacagcaggaagtttcacagagttctagactgttagaatgtgaagagcctggaaatcatcatgctgctaacatcattgaagaggaagaaaccagagctagaagttgagtcacttccccaagttcccacacagggtttctagaactggaaccacaaccaagtttcctggctctgaggtcagttgtctttctctactgcatcacagagcagggacgccgtcacgggggtgttgagacattaagtgagctggatcagacaagaatatatccatgtttaccttcgccttataacttatgtagtcatctgtgtcctggaactaagtaattcaattgctaaaacgttgaaagttctcttcgcctttggtcattatatttatctcaattttgaatttaatttataaccaaatcatgcatcccatttctttcatttcaagcattttttgccttggccccatatgctatcaaccccttaaaccatgctctcagcacctatacttagaaagtaagcattcaagtgcattaaaatttcagaatttccggctagagttttctggtggtcacataaaaataaacaaaacatccttgatcttaaaaggaagaaagaaagatctatttcaaaaatgaacaataacatttttgttttaaaagtttaagaattaatttttaaaattcctagaccatatcatgtctggtattcctcctgtacacagtgatcggtcaggtttccacatgaccttaagaaacttccctatcatgtaccaaaacaattgaaatgtgagaaattaatgaagaaaatgaaacgttgatagcaccaaagtggtccactctggcacttgtacccctccatgaccttgtcaacctgatttataacaattctgagtttcagcagctccatttttatatgtagaatttttctactgttaatgtcacagggaaatcaccctagtcttctaacagcaaaaaaatatatataatacctgtttctcgagaaaatctgccaattcccagcagaactacagaactttatgatataatccagggactttgctatgaacagcatctgctgagatatgccctgaacctaatagaggacaaggaaaaaggggtatttcaggggtttggggcagccccacatggtctgcaaaataggaaggtttttgggaggcaggacagttctaaccctgcccattccatggtccattttcaaaatggtgggcactttcacgcctcattctcaccctagtctttgatgtcaggaggatcctcagtatggtgagaataatactgtatttaagatgaagctgatgtctgtgtaaggtcagagtaatcatctttatgagtattatccgaagatatttggatatccgaagatatttggatatccaaagatatttgtaaggttctccaaacttctaggtttttattaaagggctgggctcttcctggtctcaaacagtatttgtggttactttggcagatgaagcacatttttcctgtgccctatgtttttggacatgcagtatatcaaagtgttcggtggaaataagcattctgttatttttttcttagcacattttttgtcttctcttccattcagttatgttgaaagctacgtgttggatctgttttttagttatgacattagatcttcatctgagattatctaaactacgttggttttcttttgattacaatctctttttttttttaatctgctaacacaagctcatgtttatctagaaaatgcgctttctcctcaaagtcatgaatcagcatgaatttcctttgagttagttcaaatcatccagaaattaacaaatttcaaaaaagaaaaaatatactaaaatgtagtcaaagctttataagaatactttatgtgctatatctcagctagtcactgagtagctgtcataaacctatgacataaacctactgtcatataccgatgacagtagagtattgaaaaaccaggtgcaccaggttcttgttttcattcttgataggttctaagttcattaaaccagtctcgcagttactcagagaatcacaaaaccaagtgttcctcttattatcttgcttagctcattttgggtaaaatgcatcaaacggcagaatgaaaaataaaaaaaaaaatttgtttttatagttgaatgacgttcttcctatgtataagttataacttgaaaattattactgcttccaagattcctaactttcaagccacatgagagtgactcatgggatcctggtggccccaaaggattaacaaggcttccagatgtgcctaacacttatttcaggaactagggcaagcctccaatattatctacaatgtgtggagagagggtggcgtgtccatgtgagtatactgtaagccagaaggttgctgaagatgtcacaaaatttaattgctgatattaaactaatccttccaaagaaattcccagcaagtagaaaaaaagtaaattcattggtgtttttattgagagagattaccaggagtgaaagatgcctgcttgaagcaatgaaacaacagacagaatataagtttagcctctctaccttatgaggagtaaactaaaaattgccctatgctttctttcagcctcagctttcctcctttcagaaaatcctccacaaaccgcacatctaccaaagaaccatttttgattcccgctcttccctatgttaaaagtaatctcttgctcttcttagctcactcagcatttctttgtacctctcatgatattatagctcttagcactttcttccagatattctagtaagttacagatacagcttaaatttcccccattgaacccctgaaggccagaagggtccatgattcatcttctgattccccaaattgcctgtgcaagttccttttaaaattcgtgctcaaaaaaaattgtttatgcattccacaattatttgttgaaaacgcattttgtgccagcccctgggctgggccctggatagccagtggtacatgaagcagagacaaaatgaataaatgaccataccaaatactgaaatccaaaacagtgcctacttttctgctcatggtatgtgtatgctctgatacgattctgttgtgtaattctgaagaacaagtcaagatagcatttggcgtgacatcaatagtcaaccacggtgtccctggctgctcattccaggagctccgtgctgcgagtgagaatgccttttaagctaaaagctttgtctttcccactgtatatggaaaaattgactatgcactttcatggagaaggtctagctaagaaatgtttatattggaacaagtcccatctctaaatctgggctgttgctgaatggtattttgtttccttggatcagggaaggggtctggaaacatctgtaatgaaagtattgttttaaaatcagcacaatttttttcttcaaatgacagataacagaattgctttaaatcaaatactctcagccttccccattcatttcctttcataaatgtgtattattttgttgtcattaaaatggcagtgtgaatactagatttgttgcaccccagacattgccattccctttgcagtcattttcttttcactttagtttgtgttctttaccttcacttttagaaacgtgctgtaacagaatagctatctcgatcacaacagttatctgggggcaaaatttcaaagctacaaaatgatggtatattgtaaagcaattctgaaactatcctccaaaatttttactcaaaagaaatgtacacattatgctatttataaatgaaaagttaaagaaaatacatatttacattaaatagtatttcacaaaaatctaaaaatgaaatcttagggaagggaaattaggggaagaaataatacaaaatacccttaaataacatgaaaaggatggaaattctgtagcaattttgaataccattcatgctttaaaaggaatagaagtagcttatgaatggtttgtgatactgtagttaaaattatattcctgtatatttaccacttgttgcaaaatctgttttttaaataagctccccaaattaaggagctgagtgttcaggatggtaattcatctgccttgctttctgtaagcagttggtgcttggtgtatttgtttattaatgaactatttggaaatggccttgttaccagtgtccctgagccgactgccactctgaaatacttggattttagcctaaagatccattcttctgaggctttttaggtgtttgacacatagcagagttgtaaaatatttgctaaatgggttctactgctcacattttacaaataagagcacttggagtcgaatttcattatcatttgtctcataaaatttgactcataaaacacatgacagagtgggagttcaacacacaatcctaagtttggaacgggttacaaacactctgtggggtatagccttccttagtgttgaaggatgaaggtgttggtttcatggctcagtcagaattgcagtgatggtattttattagtacaatttatgggccacagttttcctgttaggtggggccagacatatgtcaagctgccacatattctgcctgagcagacatctgcctctgattcatgagggaaacacctgcacacatgctggtgtatattacacaaagaggcatccttttccagggcccattgtcagatccctcaaatggaacaaaggaggtgtcagggatacagctggatgtcatacgactggcttctattgaggttgactttgctaatgagggatctgcattatttgcttcgtggtctatttctatctacactatataaaaactgttaaaaactaaaacatcagttataaattattgtatttaaattgagaataattgccatatgtcaaaccaagtaataagagaggcctaatgggctgtctctgaggactatctgatagtctgggtgtccatatggactcagccacacacactcatggagcaaacctgagtttgcttaagagaggtcactccaccttaccccatccatcacctgcattctcccctccaagatgactggggagtggtattaagaccttttgatgacaatggcactttcctgagaaaaaagggagacatactaatgggatatcttctatgagactcttgataaatttgataaacttgaacagagatgacttttatcccgggtattccagggaaaggcagagatggacagcataagtttgtttgcaggcccaaaagaggtgtgagcttcagcaataacgccacagttttccagcatcattttcttcttcatcatcatcctcatcaagaagcgtggttgagtgactagagcactaatggtgcatcaccttgctctatgtaaacagctttcaacaagttgcttcttcgctaggcctcagttttcccaaatttaaaattaagaattagatacagtccttcccagctctggcattctgtgtttctgtaatgccaagacacatccaatacatattgattaagcatctgctctatgaaggcactgaggattcagcaacaaatcaggtgaatccagtttctgtgctcagggagttaagtcttccaaggaagaaagacaaggaactactaacttaaacattgctaagctgtgtgccctaaagaaaaaaagaatggcagctcactcaggagaaccagttaaaacaaataaccctggtacagacaagtccaaaaagaagagaagaaactaatagttacagaacaatttctatgcctttatattgaacattaaatgcattaaatattagttgatcctcacaaccattctagaaggtaataaggtgagcagccccattttttcagaaagggaaaccaaagcctagagttaaataatctgggcaaggtcacccaggtagagctggaactgaaatactgatgatctcagactttctgctgcctcaggctgtctccaaaggacttaactataggaaattacatccactgcaaggaacagattgcagtgtgtcatgtcatgcccatggcagatcaatcagttaggtctagaggctgtgctatcttaaatgtaagcacatttggaggagaaattcattcattcactcaacaagcatttactgcacagctgccaggtgcatggtgaacaaatggggactgaacacagacatacatggacatttcttaaaatggcaaaaagtagatttatcatatcctagccattttgtatgtaaatgctaaagaagtaatacctaaatgtgcatgttcctggggaaatagaagtagttacagagctattagaagcataagaaaaaaaaaaggacaaagaattttaaagaaatttgttccccacatatgaaacgttcttgattctttcatttaacatttaattcactacaattgtattgagaaacctatcaaaattgactagttgacatggatcccacctttgaatacaaacccttatctattttgattctctgaaaatatgctccatcaattgaacaggggaaaatgtcattttgctcaagttgttataaattatgatagaggaattatgatacgcggagtgaaatccatctttctttagatagtgcaatcatctttctttagatagtgcaacttcaatccccagatggatagaattccatttgttagctctgttcagtcttctactagctattccagaaatatgccttgtaagaagcacttatgtccatgccgtttcctacctatggcccccagtgagaccatgcgaaattttgttgtcaccactaaatgaaggcttagaatagttacagctaaaaagacctttccatttcaacaaagaacaattatcttgcaagagatgacttcaaagagttgaactcaactttttgaaatggaaagttgagttcaggatgttggaggagataatgggtgttggtatggttttggctgttttcagagactttgcctgaagaaggctgaggaggattagggttatttaaagaggaggagaggaaagcaagggagatgggctgctctccaccaacaaagaaagtgagaaatggggccatgaggaagacatgattgaaagaagctgaatataagtaagcctaaacttttggcctatttctagctcagtctatgagccacagggatttctggtgtcgtatttaataattttctaacaaaagctgactgtgcttttattttaggatttaaaaccatcctagttggtaaattaacatttttcaatgagcctttgaaatttggtaaaggcaacttgattatttgaaagagtccttgaccttggactgtctgagaaagaaagtgaatcaggtatcacttcgcacatctgctggaccactgaatagtccccagatcaagagccagctggtctttcctaccactgcttgagcaccctgagaacgagggtgtgctggtgactctgcacctgtccccccagatccagaatctgcccctgcctcaagagactgatgcccaaaggctacagcacacaagctcccttgcatttcagggaaagtaataggagaagggaaagttggggccattctgctccacttcctctctgcctcagcacggctgttcaggcagaagccatgactcccaagatggcagctcccgccggcaagctcccctcctccacagttccagctttccctggctttgtgtaacaggctttctttatccccttgggccctagagggagcagatctttgcaaattttactgtttctagcttttatggcctctccattccttgctcccttaacctgcccacaattcggtaaactctaattctcttctttctcttcatttacactctcttaggtgaattttgattattcctgctgggcctgactacctcagtgacaagccccctcctgaaattcatggctttttccatttccttttgtctagaggaanccttcccaaaagcatctactaccatctgctttaattgacaaattattttaccttcacataaaggaagagattatataaaaaatttttagcaaactataagaacataatctaaattccgtagttcagcttcatttgaattattgcacaatcttctcctggttcccccatttcaactccaggccagctggacagggcaacctttggcctgagcttgtgggttactcttgtcatgttctgccaatctaaggccacagatagttagggctcccattattagctctcttgatccctaaggaagcaagactgtctgagtttgggtcatagatcctttcttaggacagaaaactggcctctaaaccctcttacttaaattttaatattgtaatttctcagtcaactggaaaatgagagtattgtgcactattttgaggatcttttacctctgccttaaatagtaaggcccaactagaataaataagcaccgtaaaagtcctttgagttgcacatgtagcctcggacatgtagctttactgctagcataaaataattagtggaaatcagatttagtagccactcaaatattatagaagaacctaaaggctgatgtatgctttaactaagacagatatgtgtgaaatgtgccacatgggatgaggcagctgctagctgtaaggtgaaaaacaaaggaaggacaaattaagtaaggaatgttattttgcttatttttaaactgtgttaataataatgatacataaagtgaataaccaggaagttggggaaattatacacaagcgtctcaatctattgtcaagaccacattagtcacttcctagagatgatgttttagagatctcaccgggtatagacatggaaatcctatatccagacaacctaagtaggatcttttgttttcctttcttttctttttctttcctcatttgctccttttcctctttctttcattctttcatgagaacgtgtatgtcctccatggattttaagaaataacatagtcaggcggggcacggtggttcacccctgtaatcccagcactttgggaggccgaggcgggtggatcacgaggtcaggagttcaagaccagcctggccaagatggtgaaactctgtctctactaaaaatacaaaaattagcctggcatggtggcaggtgcctgtaatcccagctactcaggaggctgagacagacaattgcttgaatctggaaggcagaggttgcggtgagctgagatcatgccactgcactccagcctgggcaacagagcgagactccgtctcaatataaataaataaataaataaataaataaataaataaataaataaaatagtcgaagccctgagactctttctcagtctcatccccactcctttacccttaactggcctgatttctcagattcctatttctttcttcatacttttctttatatatgtgtatccctacacaatatattattacatcatattattttgcatgttttaaaatacagtataaacatcatactgtttctcctttgcaactgactttttcctcaatattgtatttaaaagattcatttgtagttagagatatcttcacttgtgaaatttgcctaattgctctccaaagtgttggcacaatttgccctcacttgcctcattctttaccaattcaaacccatttttctgctagcatatttttggcattgacttgctatttgcgaatgactatgataggtgatgaggacacaaaaatgagtaagacactatccctgttctgaaggagttcacagtgatttcagggaggcaagagtataaattaaaatttataatgtcatgttccgtgtgctctgatgaagtctgtgcaaggtgccatgtgagtgactgagtctgaaagtctagggaaatagttcccaggtgagatgaagtagggaaagacatcccaggcctctgtagcgtatgtaatagtatatgcaaaggcaaggcgggccaaagcatgatattcatgagggttgtggggtatgtgattgcattagagcagagggagccaaggttgatcctaaagaaatagtttaaggttggatccttgtatgtcatgctaaggaattttacatattcatgtaggtaatgaatgaagagccactgagaggttcaaagtagaaaagtagtacgataagagtttttaattaattctggtaatgaagaatgaactggaaggaagaacttctggtgatggagagagtagagtggagagaattataattatccgagagagaaacaccaagatcctgaactaaatagtggtattgggaacaaggaggaagaatctccttggtagtatttcagaggcagagcataaactctacaaggcagcagcctacaaagggaggcaggaggtaggaacagcctaacccaggaggacgcaagggcatgcattatgtgtagagaatttaaaaacaacaataaaacttactaaaactcagtctgctttttattatcaccatgtgccagcaattctaaacaatgtcaatgacaaaattatcctccctgagaactcttttgttgtttaaggtctaagcagttgctgtggttactgttgagttttgataatataacaaatatgtaaacttcaaattagcacattccaatttcttaacctttagtaaacattgtttactacatttggagaactcctagtcctacagcccaccccagcataggtaggggtatcagtttagagagtaagtttataacagttcagaactgtgtaaggtcaatctcacttgagactctaatctctgtggtacttcatatatctgcatttaaacctcagattcgaaataaacgataatagcacagtgactctgaaaggtaagataacttgagtgcttacattgtgtcattctatgtgcaaaccatcctctgatccttgaggaattccctcttctggaagtatttccaaaaattactttaatgcaaaatacattaatgtaatttaaaagtgttagcccattaccttttctttttatgttatatattctttatctttaactgagacataatataaacataatataaggagaaaaagagatttgggagaggctatgataaagtcagtgtgggacacactcaacttcaggtgcctataaaattggagatgggcttgtctaacaagcacttagaaacaagggggtggcataaaaaactaagatcagggatatgtagagagacttaggaattaccaaaatatagctggaggataaaattgggggagggattaacatcatccacaaatttcatccatacataaaagtgtatagatagaaaagagggctaaggaggttaccctggagaacaccagcaatgtagaagcagcagaagatgaaccacttgcttctgccccttccccgtcccctgccaaaaaaaaattaaattaaaaaaaaaaaaactgagaaagaaaggtaggcaggggaaaagccagaagaaagagttgtcctggaaatcaggagaagagagaacttcaaggagggaagaaatttcaaaaatgtttgctttttttttttttttttttttgagacagtcttgctctgtcgcccaggctggagtgcaatggcgcaaactcggctcactgcaacctccgcctcccggattcaagtgattcccctgcctcagcctcccaagtagctgggattacaggcaaacacctctaccactggctaatttttatatttttaatagagttggggtttcaccatgttggccaggctggtctcaaactccttacctcaagtgatctacctgcctcagcctcccaaagtgctgggattacaggcgtgagccaccgcacccagccatcaacaatgttaagtactggaattccatctttgtgagggcaatttcagtgtgcaatggaagcagagccagacgatggatggaggcatggatcagcatagcatgaaggaagcagagccagtgcgattaagttctcactcaagatctgctggacaagaagaaggaaataaaggggaggcagacaataaaggggagggaggatattcttggatatatacccaagggagggatatatgtataaaagggagggaggatattcttggataataaaggggagggaggatattcttggaggataataaaggggagggaggatattcttggatctgagcccaggtaaagatgtcaaggctcatccaacacaggttgaagcacctaagtgttctctttgcctcccctcatccctgtggatgtgaaagtgcatggtatgtgagaggaaggccagatgatggggccaggtgtgatggccagagatgcgtggatcccagagcacagatagaaggcttctctttcctatagtgaaaagagtactgcttctgagatgggcagaggacacaaggatgagtcaagacaaaggggaatttagaaaaaaaagacagtatgagatttcccacccaatagcctctgtgttttcactaaagaagcaggattagctgctgagagtaagagggtacaatagaagtttgggatacatttattttttcctattaattcacaatagcatttcttcagtgatgcaaaaacctgtgaggaagagcaaaaggaaggaaagacatgtcctgccagtcactttcactttgtgccttgcatcttgagaaatctagggtgagaatagcactgaaatacccacaggacctcaagacagaagcagggtcatctaccagcaatggacgctgatgaaacaacccaactgccttccctgagtacactgaagagaagctgttgtcatttatagacagttcatcctccaaacttcttataaaaagaaaagtaatttaggcagacttttgcaagactgtaggtcattaaatggtaatgatcaaactggatcatccataaaaagcacttagctcagtgcttggtgtctgtcagtaaattattagctgtgatttataaaaaccagatgaagatgacagagatgtctttcacctcacaacattgattccttctaagtagctaaggagtcaaatcaaaatcccctaaatgcctataattctgaagtcctttctctctactcattcttattgctaacccttgtgtgccgcatctcttcctttcttggaaatgtgtccaaggcatttgccccagtaaattaaataaaactgagtcagttttcagatgtaaaaaaaaaaatctggcagcatcagaggctatgttgtgtaaccatagcttggaaggcgaggagtgaaaagaacaagccagttacaggaggtgatgtgagatgaacccagagcagaaagccagatgttagcaggagatttatttctagaaaaaccaaaggaaaaaaggcagcactgaagcctcgttatgttatataagcaacaatctctactataaacaagtgacttgacaattactttaaataattttcaagaagcaaattaaagaaatgttcattagtattaataaatacaatcatcctcaaacccaacatttctaaaagaaaacctgtacggctgtaggggctgtggattttcttagtttattgtttcaattagacaaataaagagggctatttattagcaagcgtagcaagtacttcaacacacgccaaggctgttggtatctacagtccaaatagttgatgaacagggttcagggactgttatttgagagctgtgagtggagcactggtttccacccatgaagcccatgaagagtgctgaggagtagccacagaaatgtgatgtaaacatgtgataaccctgtctccactctttacaaaattaaaggacttggcttaagagtggttaggatggctctgtgctccttggaattcctcaggctctaagtcacagtctctattttattgatggttaaattgagaactggagtgttttgtaagctgagcaaggcatggcggatatggggcctgagcagtaagcacaaaggtaactctctaggccaagtaggggaaaccagcaccatagtctgtgtttggtttttggcctagctttattatgccaacctaagaaaaaaatgcctttgaactgcataaacctccgaagaatgttgaaaccactttcctaattgagttatggtgaaatcgctgtcaaaatctaaaaattaactttgcctattaaaatgtggggaatttcaattatgcaaacaagagcttagagatacccaagggaggatgcgtgagtaattgtcttcagattcaagtaaaatcaatcaagaagccaacttcttggtaactgcaacacataatccatttagctcattttggcactttataggtttgtgcactaaaaatcaggacatgttaagcctgatctgaaaaacatatggagccaaaagttagcaaaagcttaaattcagaactgcttgccatttcagatattccatattttatttttactgacacagaaaaaaatggcttgtgaaatacctactcatttaatatattcatatgttctcagaagtcattcctccttagaaaagggtggaatattttggaaatttttgaatagattaaatcatgtttttctccactagaaaatccttgaatactatctgattcttaagtctgcccaagttttaggcagatggaagtcagcattgtgcagaaaccacagactcttaagtaagggcacacagttttagctcctaactgagcataacattctatcttaagctgacttttattatttgctaaaacaaaacatggaactcactataactaaactggaactaaaaatcattgttgtctggaaacaagagaaaagtggattcatcaaatacatacaaaaacctaagcagaaagataatgtaatgtgggctgttaaatttgaagaagactaatttggatggtagcaatgattctgaacaccagtgaatgaatttagagggattttgggtttgtttttgtttttatcctttctatttggagcctcaataaactgaagcaaaagttgttgaatcaaattctaagtctaattcagaaaggaagatgagttgagtcaatatatgtcatatgttcgtagatctttggttggaaacacaatgcaaataactattccaatcagctcctatgagaatagacactagggctgtagagtgtgttctttctgatggaattttgttataattaattcttcatcattcgctggagctggagacttgggtctgatcctctttgggactcagaaacctcagaatttatctcatactctccgatgacaacttcaaactcttcctaaatcccatcaagttttgccattgttggtttgtttaaatgggtaattagggaccttagatccctagaagatctattcgagtatgtaagtgatttaataaatcaggcttctcaacagaaattctgaagttctctgagattctgtatctatgcaaaagtagtggcttgtgggcaattaattagctcctctgtgatagtgtttgggaaacggtgagatttttgtgaaaattttttaactaaaattttgttacttagattggtacccactttatttaataactgcaaatgacttaaaagtttgccatagccaaagcatgcatactggactatccttcaaaagaaagtgatttaaatatttttagaaaatgtttaaaatgttatatccaatgacagtattgttggtatgactctagtgctctcaaggggctcttcaaatgaagacaaaaataatcagatactcgtataaaggtcattcacttggtcctctttgttaaacaatcttaattcattataactatatcttatgaaataaataatattatgatcatatgataaacctctggaaataattccttctgcagtgataacaacatgtcctgtcatcccagttcctttaaatgtaattgacacatgtagatacaccacactcatttcctcataaagttacatctagttctcatttccataaatgtaaaattaggcaagtacacatacaatgattttactccaagccagacctcatactaaatataacaaagtaagcaaatgggaattttcactcttatttttcaaaggcagaagtaaatggtatggattaattcagtcttaatggtagagcaggaggcaagctgtgataataggagtctcttaataataaagagctgtaaaagatctacaagtaacttagtggaaggtaattggtcaaagagaaaatttggctaaaataaatatttttaaaagtcaatatcccattcaatggttttcatatattaataactatgtatttttaagtattgtgtctattagcaaagatttttttctgggatttaaaggaggcattttacattttttatccatttcagcctgctttgaaatgttaatagcagcaaaaatttggaaataacctaaatgtccaacaagaaatgtttggttcaatatattaatggcacgcaagatggttaagagctaaaacttgagggaaaaaatgaaggatctaaatcctgggtccaccatttcttatctgtattagccggcttcagtaatacatctctgtaagtcacaaagtcctcaccagtaaaacaaagacaagggaacctacctcatagggctactgtggtgtcaagtgagagaattgtgcaacataactgacacagtgacttaaacatggtagatattcatgttcaattaaataaactttaggtatgtatttatttatgaggggcagcaagttatagcaaagaaagaacaagatttggatcagtctgaactcttggagttgtatgacattgctggccactatattataattatcatcatcattatccttgttattactatcaatttttaaaaaggccatggcaccccagaaggtacagatcctctgaatgctaagattgtgtttttacagttgtctagtataggacaggcttctcatgtggaaaagaggattcagtgtggtatcaaaaaattgattggaaggcttcctctcttactctctcatacatagacattcacaaacaccatctttgtttagtaaactgtggagactcttccaaaagaaaatagacactaatttttggagaatccattcagctttcacaggcctctaaatagcacaggtgttagaattactaaggataacgattacattaaccaggagcaaaactaaaaatacatcgttctactttcatacttggaaatatcggccttttgatattacaaaaaggccaattttgccaggtccttcgaaatttcaaagaaagattcagtaaaaataaataaataacaggactcactggagccatgatgaaatatttccacctaaaggaaacaatctttaacagctcatccttcagtacactcaaacttctcttgaaccacttaaaaactccattccagggagtcctccaaagttccacaacaccagacgcaagctacccaggacatgtgctctagcagggcatgcccagggcccccagatagatgactgaaaaatataattctttcaggtggacaaggcccagcaggaacgtagtgtgccaggtttccctgccagccctcctcgccctctcggcggggggccaaatgactcaacacagccctgttcgtacctcccttttcttcccatctcccacattataagagatcagagccaagttatccttcacccaaggtcataatctcagattggggagtggtaagtggataatgacaggctctcacagtgaactctcctcctaaacttggcacatcacaaagatttcatcttgcatgctgtccaacctaggcactggctgctggactgttgacaaagagttgagatgaaatccacccttaggagagagcagtggatggattatcagtatattctgtgggctcccaatagtatatatgtctccagtttgctgtccttgtccaaaccacccaaatcaccaagagttcattgagcaattaatatatacaaggcattgtgagagatgcttccaaacctggccaaatatcagagtctttggggagctttttaaaaatgcagatccttcacaatttttctgtaaatctaaagttattctaaaacacaaaagttattttttaaaatgcagatcctttggtttcactgaatcagaagctccccagaagactgtaatatggtcatttagagagctcagaaaccaccatttaagaggctactaagataactaatattaagaccgtcactactcttacccactactcttataaagaaaaccctgcagtcatgcaaaactgcaacacattcatgggtcatcagatcaattttatgggtcatgaccaggatatactcttaaatacaatagagaagttttaggtacattattactttgtgaatcttttctctgagacacatatatatggatatctatatctatctccatatctacaccaatatagatatagataccaatctgtgtactgcatcacaatgaaaacatgtatgttttactttgcggcaaagactaaaaatgtgaaattaaatggtctaaattaaatgcttcctactgcaatcttagtgtcttccctctcttgttttctagtggaaactaagaagcttaccatcaaccacaactctccattaaaaaattataaattgatcttctcttagccttatttctctaacttggaaatgtggaatttccttgcctttttttcatagacaaatgttgttattctttattaaacttcctccaaatggggtttattaaattttagttttaaagtgtgaactgatgtgtgtgtttttttttaaatactgtgaatggtgtttagtgactctttctttacagagtaaaaagcaaggggaaataggtttgcatagcaatcagagggacttcagccagatataatgaaaatttcctggtcgccagggaagtgcaaactacaatgggtcaatgggggtgtatgatgtgaaatcttggactctgtaagtctgtggaaacaaagcagattcttatctgtctggaattctttagacataaacttgtctgatgggcggggagcggatttccaggcccataatgccatttctgcccttcatcactgagacattccaaagaaatatcaaatgcatatccacagcctaatcacataaaccaggaacaatctcataatgtgtctcaaatggcacactaatgatatctggggagggcagctgatgattgtgcaggtcaattggtgcatgacaggatagtttaacatccccaaaagccacttagcacctctcaatctcatgagctcatcactaggataagggaaagtcatgtgttcctcgcagcattctgaagacaaatgaaatacatatatgaacagcacccacacaggacttgacaagtgtaagaactcattaacttccttatccctccctttaacatgttagcatctgaagaaacagatgcttttaagaactgaagttcatgaaagactcagttgctatcctatagctaagttgctctcctatagctagtgattgctgaaacgagaagtctttctttatttatagggagcatgacctcaccctgactaatacttaattgtggtcttgttttgttttgcttatactggaagaaaacattagcatttttttctcccttactgttacgtaataccttcttattcttccttgcaatgataagacagtgttaaaggcatttctgttctcctgaaaagtgaaaggagggaaaaagttatgtaacaaagaagattatatatacatcatctatcactgaatggtagtataaatagtttattttagtatgttttgtatgtatcatttagtatattcattttagaaatgtttagattgtttaataatcactttctctgatttcttctcagaaaatattgaccaaaatcaatcttttcaataatcaaaatggtttggtgngtctgttgcagaaatgcaatgctggattctttcacaccctgtcgggagaatgtgtgccctgcgactgtaatggcaattccaacgagtgtttggacggctcaggatactgtgtggtaagttggggcacctataacacttcacgtacttcactgggcatttgcatcttgggtgaagataaaatatttttcggatgtttgagccacataggagcaaactgctaatcaagtgcttttgttcacccttcagcttttcctgtgaaacaactcatataaactacttctgattttaagggtccaccaaggcatatgcatgagtgtgcacgtgcacccggaggctcctgccccaccaccctcagcagctggttgcctgctgtagaccaatggcggtgggattgaaaatgatacatagaggaggaacccatacatccaaattcctctgtaatcgtatagtttgccatatgtttggcttcgttccacataaaccaggagaatgaaacagttgttgcctagcctattttagaacctaaaataaccaggtctatagatcaaaattagtttttaaaaaagaaatttaagtttgaacccaatagctgatgaaaatgaaagctttgcccttgtggtctttgcaagtctgtgtttaagcccccaggagactatttttttccttaactgaaatgaattctccaatagactgttcttcattgaagcatgatagagccttgtgcgaaagattgagaagtcttccagcagaaaagtacttgctacatatttcccatttttaatgaatggactgacaacttaagtgaaaatgggtgttgaaatatttaccagaagtggcttcagtggaagtcatagagggcatttataagaacttatgctcaaatagcatgttttccttcgtgagctgtgtgatacagcagaaaaattcttcaagttcccatctggcaaaaagaggttttccaaaactacaagagtatttttgcataaactataagaatacttatttaaatgcactcaacatttgcataattgtccctattagataatttttattttaaatggcctcttaggtgtgtacatgaaagtgatattttattcacacattaagatgcaaatgcaaatgtttttattgatctttaaccctagaagttgccatttttctagggacagagaattaagtgacaaaatactaatgttgctatctctttgtagtgtttatttagtcctgatatttgttttcccttcccccatcttcttaaataagcattacaaccaggatgtcctctgtcacagtgtaggcttctgcagctgccaaagtctactcctttctaatgcttccatctccggtttcctgttattttaatcccagtgacatttggggggaaaaatcccatggatacacttgaactaataacgtacatctctgataatttgaccaattaaaggttgtttgttatctgatttattaaaatataaagcagtggagactgtcaagcacatcagctgctgttaggcagtcaatattatgcaagactgagataaattaaagagggaagaagtccctcctgctagagtctattgaaagaaatgactaagccactctttttacaatgacattgtcagaatgggagcaatcatggctttatctctgacctagtggtgagaggaacaaacatcatgtgattccctccaaggtcctgtgacataacaggttctaataaatgtttagggatgggctagcatatacacatttacatgtgcactcagtgaagctgccaacattcctccaactactttgttccaacgcagaaaatgaatacaaaaagaaatagccattttattcatcttaatgatggtttctccacctcatcctgtccggagaaaaatatcttttttccctcattaatgtaatatatgttcagtgtaagaaaacagaccaaaaatatagatacattagtataattttcctattaaacagattattttaattataaatggcttgaagtacaaagtaaaaatcacccacattcctatcccccagagcgacacatatagatatattcttataaatttaatttagaaagaaagaagatatagtggctagggatggtggctcacacctgtaatcccagcactttgggaggccaaggcaggaggatcacttgagtttaggagttcaagaccagcctgggcaacataatgagatcccatctgtacaataaacaaacaaaagaaaaaaagaaaaaagatatatttatatttaattaaatgtaagtgaaggggcagaaaatgcttgcacatgaatataaaaagaattttttatttcacttagttgcaaatatgttaagtctgtggtgtcacactggaatcaaactcatttttttctgtttcctttggtgccgctatcccagactactgacggagaagacccaggtttttcagcttctgccctatcgttcattctcagctctcagggagccagagaagccagggctccaacatgaacacttcttgtagctcactgtcatgaccagtgtttcagtcagttcttgcaggttgcctgacttacctcatttctctcatttcctgtaagcaaccaaaaataaaaggctttcttttatttcattttgtcttattttgcttttatcttgaaggcatataagacctctgtatctgccttgttcaccttcaactgcttctaattcttcctcaattccagtgtccaatgtcaatttgaaattaaaatttacagactgattttaactaagctgttggtaaagctgacctaagccattcagccacaaaatatagagtatacaaaantatgctaccattttacacatatcaagcaagcaaagagatttttttttactggtggaacactaatctttcaaatatagaatagtggctaaatgaaaataaaacagcttagaaatctactatgttttgagtgtctttccaatgggccactttgcatcttatgagaactggaacacattggacaggattctcagctgagtcagctcggtggggccccaaaggcaggcaactctggtggatatggctggctctctataaaggtactagaaggaggcacaagataaaaattgaggggaaaaaacaagtggaagcagataggtggctggtggcagaaatgcctggtcacagataatccatatttcatcccagccctagaggcttaagtacatagaacccagaaggagctctaactaaggttagttaccatctaaagaatgggtgctttgtcattaggagaaagccaggagcccaatgaccagaactagaatgggacaaacctgacctgaagttcaccacaggcacagggctcctcattttccttttgattaagcattaatttgtccattaatttaattcacccagatgaacttccagcctaccctaggcacaatgagaagggaagcaatccaatatattgaaggctaatttgtttcttattagtctcagagcttaattaaaaccctattcaggaaaacaaaggtattacatctcagtttctgcagacactagcattttcatgatttttgaactctattttattactgtgtaaggcagaaatcaaccatataagtccctgtaagactaaggatgtgtgatcaataaaccagcatattcatcaggtgtcgaagaacaggaagaaactgattatagagacttcttgttcctgtttttcttgcaactgtaaattggtatctagatcaagtgcataatcctttcatgaaaactttgacaatttttccatctgttgcaaacctggaaaaatttgaaattttggaaagcatcatcagtttggttccatgataactgaagttctgaaagaaagtcagaaagtttcgtgtccaaaggattctaaggttggacagctcaatggagtcccctgttgctgtgtgcccatcaacataagaatatgacagaaactggccgggcacggtggctcaagccaataatcccagcactttgggaggccgaggtgggaggatcacctgaggtcaggtgttcgagaccatcctggccaacagggcaaaaccccatctctactaaaaatacaaaaattaaccaggtattgtggcgggcgcctgtaatcccagctacttgggaagctgaggcatgagaatcacttgaacccaggaagtggaggttgcagtaagccaagatcacaccaccgcattctagcctgggcaacagagcaagactctgttaaaaaaaaaaaaaaaaatgacagaaactgaatgcaagtaatgagttatctatacattgttcatcctttctctcccaacctgaacttggtcctccccatatactcctcacctgagttggtgacagcattactctgctggtcccccatgctccatcgacctccttttttacctccccaaccatcagtttcacatcatatcctaccaattcaaactaggagagagctctcttctatcccttcccactgccttaattcacagccacaacctccctgaccactgacacagcttcccaacaactcatcatccatcccctgctccagactctccttcctctactctgtctcccacacagcaatggagacgtctttcaaaaacacaacccaatcaaggcatcccactttccaaaatcctccaggagtttctcctccagccacactgagcacactgccacctaaacatactttgttctttcactctcttgtgcctgaacttgttcccctgttttctacctgagatttcttgaaagacaactttaaggcttagttcaaatgtcaccacctccattaagccttctccaactttctcaggaagagctaaaagctgcctttccctcatctttgtcccataacaggtatgtactttctgcatacctcagacatagccttcacacactgtattgttctttgttgacctgtctcttttcttcacaagtctgtgagttactcaaaggcaggaaccaggtcttcttcattttaataacagatatggctcattgtctattatatctgcttaattcaggtttgttaagtgaatgaatgaataggttactaaaataacaagctaccctaaatgcaaaaatctttaattttgtaatttatgagatacttgggtcacttctttatggtactgttatgagatacttgggtcacttctttaagatgtactgtcttatgctagaaactgaggctcaggcccaaccctgtatgtaactagcaaacagtgctgccaatattaggtatttttatttagacccttgcttgtcagagtgtaatccagaccagctgcatggatgatatttgggagcttgttagaaatgcagaccctcaggatgcagacatcctgactcataatctgcattttcaccagatctccaggggattcacgtgcacattgaagttggctaagtattgatctacacagagagcagtttgcagaccttatgatctcataaacctttacactgttaaggattattaaagataccagagagctttttttaatgtggactatatataccaatatttacggcatttgaaatttaaactgaaaaattttctaatccttataaattcatttgaaaatagcaataatataccaattccatgttaagacaatatgtttttatcaaacaaacatattttacaacttgaaaatatgtttaatatctggcttaatagaagaagatggattctgccatctgcttctgcatcaatctgtgtgatatcttgtgttgtgtagcctctacacaatttcaccttacacatatgagaaaatgagaatgcaaaatataagaaacatcttagtattatttagaaacagttttgacctccctgggcatacttagagatccatggatctagtcttgcataaagcacactgacaaacacaggaaggctaaccagattcttttgagccttcttcctacattattctggtcctgtgaccaagcacatgagagatatcatttctcatgttggggagacacagttggtgtccaaatggcaatcccaacacttatctgcaatcgattatctagatatagctttcttaaccactggctaaaagttcagaatgctaatttcatttttaagtggagtcagttttattaaaaaatgaacttttcctcctgtattaatccattctaacactgctataaagtcatacctaactgctgtgtctatggagtggccattctttattcctatgctttgccaataaacttgctttcactttactcttttgattaaaaaaaaaaaaaagacgtacctgagaatgggtaatttataaagaaaagaggcataattggctcactcttctgtgggctgtacaggcttctgcttctgaggaggcctcaggaaacttacaatcatgatggaagacaaaggggaagcaggcacatcttcacatggcctgcagtgggaggtgggggagagagagagagagagggagagcacaaagggggaggtgctacacactttcaaacaaccagatctcagaactctattacaagacagcactaggggaatcacgctaagccattagaaacaaccctcatgatccaatcgcctcccaccaggccccacctccaacactggggattaaaattcaatatgagatttggatgggaacccagagccaaaccattcacctcacaacaacataccttttttattgttgtcatatttgttttctgttttttaaatgccagagcactgaaggtaaaacagaagacattttgcaatctcaaagtaaaaaattatcagagctagaagaaacctgaaagnccatctagtctaaatcatcactttgcagataagggaatagaaaaccaggaaggtcaagagacttgttcaaagttgaccagctagaaagtggaagagctagggaccttttctccctgcctccagcactctgtctgccaatctcccagaatgtgcattgaagccttttagggagtttcataataaaccttttgaaagaaggcagatgaggaaagttcatacttgcattctgagcagttagagggcaaaagaaatttggtggctttgcttttgagggtcactgcttcccatggctgccatggcagaattaaagccctgacaaggaatctaaagcatctatcgagccataaggggacagaattgggaattagctcatttttgcaacacagtagtcactttgggcacaaagaatggcctaacatcttacaatgggcctgttttcttctgcagagaggggcttcatccgtccagcaagaactcagacaaatttaaccccagcctacaagcagccctgccagattgtttatggcttagtttcatggtagttgggtaaggctcattggtttttcctgggatgagagattgctgcaactttgtattagctttgggttcatgttaatttcctttatttgctccagacacaaattcattaatccatgcttttcccttttccttcatttttccccaataaatatttccaaagactgacttagcacaagacacagtattaagaactgtaagggaaatatgttaacatcctgttgtctgcatatcatactttatttttcagagtttctcattgatctgtcaggcaatctgaactagcccctaaattctactttgcagacataattttaatcagggactaaagattgctcatacctaatggctgatcaaatgcctgaagaacattcaaccgggatagctagttgcccttattaagattcttcccctttgactaatgtattaatattatatttcaattgaagctcaaagtgttagtaacactgatgccttctaatgcattcattttactactgtttgttaagccttttcttcaacattactggagaagcagtataatatggaaactaacaagttcacttctggagccagatttcctgaatttgaatctcacttttgacacctactatccgtgtgacctcgggcaatttgcttaatctttctgcacctccatctcttcagatgtaaaatggcaggggtgagggtggcaggggaaataggaacctacttcaggattgttgtgagaattaagtcagttaatccatacaaaatgtttagagcagggccttgctattcttttattctgaacctcaaataaagcataaaggccaaaataaggacctcagagttcagtctactgctactccatcttgctttcccaaggctcctccactgttttaaaaaagttgtcctgttgaagctcttatgcatcggtgtgactaaggcaattgctcaaataggagggtgcttcttcaatgacattctaacagtataatttttcactgcaaccccaattcaacctttatacactctgatgaatgtaaagatgaaaaaaatagagctaatggctttgccttgtaccactagtatantcccatagaagaaagctgtttgtgtgttagctcactgccccttatagaaattaatccatcagtttgacagttactgagtgcctactccgttcgagttaatggcaatacagtgctgaaagacacagagttggggaggggtgatgaggctgagaatagataatagcactacaatatgggtagtggaaaagaaggaaggatcctgaaagggagaattaggatgtactttcaagagattttgcagcctagtgtgatcttgaatgatgaatggcattccagacagaagggtcagcctgctttgtgcttttactcctataatctttactacaagtgggaaaatcatacaaaaaaaaaacctccttactgattcttctatgtcactatccaagataccaacccatgagcagaatgctctttatctaccttctactccatttatactacagtctgacacattttatccttccaagaccataaatccttattgttcccattgccatggataagtaccagggggatgtttgtttgtttggttggttggttggttggtttctcatttcatattcattcgaagtcaataagccaatatttctggaacatccagggtttgatcattctgattatcactctgaactgaaataagtaactgatgaataatctcctctgcacacaaactctagagtccccaggctactagcacacacacacaaaagcccaggaaaaattaattcaccacttacccacactttctggcattgactggggccagtgtgactcctcatgctaatctgtactgccgcatacagtctgtgctgtctgatctgatgtcccttttgcttgaaaaagtattgcatgatgcttagatgtgctgtctctaaaatttctttcgcatccttgtcaatcttcttgtcttttgtctcatagcactgccagcggaacacaacaggagagcactgtgaaaagtgtctggatggttatatcggagattccatcaggggagcaccccaattctgccagccgtgcccctgtcccctgccccacttggccaagtaagtcctaaaggaggatggtctcttctaatgatcagtctatgtattgttttgttttgttttgttttgttttgccttatcccagagttctgaggtttctccacaggcaaaacctcatattgagatgagactggaaaagatatagaaaaagtttctagtccaaatacaccacctggaatgcttaagcacttacaatatagatgatgactgtgttcccgaaatattggggtgcatcatgaggtcaataaagtctcctaagttttataagcaaggatagtctcatcttttcttgactttctcttgacctagagcaatcacaactggtaatcccaacagactcattataatatcatattttcagtaatattgcctcttctgactttcacaaaggaaacatttccctacatatggcttttcagtcagaattagaacacagatcaacagaatgcatgctttaggccaatcagctcacagaagatttacaggaacactttctggctacgttttgacctgaatgagtagttaaaggaaagagacatacattttaatggaaataatggaatatgtgtaaatccagtaattaagtcatcaatggccattttattctctttaaaatgacagaatatggaatttaagaggtatagtgatatatggttttccaaatgaccaactctctgacaccaactgggtgtcctacaatcaattcagttctgacactaagtttccacagtcagtgcagatcccacagattaagagatcagttccacaagaatgcccccactacaaatgccagccaaaaatggggtccccaggctagtcacacttcttcccagaagactgtaaatttgagaaggatccctcaacctctcctcaggtttgacagttcattaagatgactcacagagtttagaaaagtgctatgcttatgactgtcagtttgttaaaaggttacaactccaaaagagctacatggaagtgatgcatagagcaggatatggagaagtgggagtgaagaaggagtgcgtgcagagactccaggctctctgctggagcaccatgctctcagcacctccacgtgtcaccaaccggaagccccccaagccttgttgctcaggagtttttatcaaagtttcatgttgtaggtatgattggtcaaatcattggccattggtaactgaactcaatctccagcctctcctccctggaggttgggggtggggagggttgaaattcacaacgtccaattacatgtttggttcctcggtggtgcctctggtcataggctcccactctcaaggtatccaggggtccactgtgagtcacttcattagcataaactcagatatggttgaaaggtgcctgttatgaataacaaaagacagtcttttccctcaggaaattccaagaattacaggagtctgtgccaggaaccaaaggctaaatactgttttttttattatgccacaagtagaaagagtagccaatctaggttcatattcaaatttggacacataatacctgtgtgatctcagaaaagttactttctccctagatctcactttccatgggatttgaagtcaagaagcctgggttcagatcttggctctactccttgattcatttaccagcccagtatttcagattttctccttagtacagtaaatcaaactaggaagtaaggatctgcatcatagagttgtgaggactggactaggataatatgtgtggaggatttgggtttgtaccctaaacatggaaaggcataaggtagatgttgcctttactgaacacataccgctatattttttctaacacttngatttttcttactctatgcctggcattgttctaagtgtttcgatgtaatatttacgtaattgatagctgttgtaaagattaaatgatacacataaaatgactttttaaaatctgaatgcttactacacacacgcactcactcatactcacacacttactgataaacagaaaagaaaaagacagatggcaatcagattcccccgatgttttttccttaattgaacaccaatatcaactaacatttcacctaatagcttgtgatgtattcaaatactacaagtctaacagtcagagtagtcagacgagtttcagtcccatccttcttcagaaactgttaaactgcctcagaccttgctctgtaatttttcatgtatgatagtattaataacatgtgcaaaagggatggtactcacagtgagggtagaaaacgcaaacattaactgttctgttattttcactcaagtatgtcctgatttatgagctcccttcactccgtcttggtatactttttcattgttcattaatattctgctctcaagcattcgttttaatcacgtctggtgagatatttagcacagttctcttgccatggtatatattgttaaatatattacctccaacttcctcatagctggtttcactcattctctcataaacatgttgtgtagcctcatctgctcagaaaaggtttataggcgtcgagctgcagtgtttgtttttttttttttggcagtagcagatgaattaggcaggcaatctcagatggttctttctaattatgctgttccacttttgcacttttcaccccatttgcatgacaagactttcttatctaaattacctggtcttgggatatgagacctttagaacatcattccctatggactgagaagccttgtctacatgcaatcagatatttatcgagcacttattatacactggtataaaaactggtagtcagtacttattatgtgccagtcatgcactagtcactggtgacacagcagtgagtaaaacagtcaaaaatctcacctttattaagataggtcaaaatacagcagtgttttgaaactcctagagcaaatgaccctttaccttttgaatcacagtatccggtatgttagttgagcaagaagcgtttctgaatgctgttaactctttaagaaatgaagtcaaaagttgccaactgtggaatgagtctcctttcctgaaagaggaaacagtttccaaaggcatcaaggcaccatgtctgcccatgttttttctctgtgtaagtggatccagggttcaaaggagcactgaagggacttagagaatgtgctctaaatctagatgcatattcacagacacgaaaactcaagtctctaatagtacagattcgaggttgaaaaacctactgaaaacgaaaatgaagtaaaaagtgtgtcacctataagtaaatatcatgtaggagtagggaggaattggtaagggtgtgagagaccaagggattttacagatttttctctgtagtgacaacagctctacttcttgaatcccttgctggggaaactggctgcaaaaaaggagaggaggggttcatctgtggtcatggaacagaacaaatattcttgggtcctaaaaagttctaacctttgatctggacttattattaacttagttagctaatctcaaatactaatcaaatatcttatcaaaaatcaaatgcccattgcctctttcagctttttaagaaattcatattgctactttctataaaatgaaagttccaggacttttcagaaaggcgtctagtttagactctgaattacattttgaaacattgatgaagctgagcccacagacgcaggatttggatttccagttacaagaaagcaaggaaataatgcttcaggggnttaagcaaacaaagggccgagtctatttttctctaagttcctaaggattttctaagagcaaaaggcacccttccacttgaaatgggcaccacagtggttacagtgggctgagagagacgcagtgttttcacttccctagccaaaaccagacaaaacataaacagttaatgctgatgagaaacaaaaacgaacccttgagggctggccctgccaccgagtctgccttcgccacagagaccagtggtcatgcagttgttcccagggaccatttgcataatgttcatgtatttatttgggggttggccagacgtcctccatctctaccagtagctatggaaatcgctccagttaaggaaaatgtcatctgtttgaaacagcaggacaccagctacaggcggatgactccagatgcccctagcagatgttgcatgcttcaagcgtgggcaggctgctgggtggaacaccttcaaagaaagatggaagcgcgggttcctgttctggactcttaactgacagtggttctttaagtaggctaagaaatcagaacaagcaaaataaagggtaaaaggccaaagaaatgtaattctgttggaatgtttttacccaactgtttgcgaaaataaattgtgggtgttgcctttcactgagaagcacatattgttttctgactgattttttaagtgtcttcaaacaaataaacacatctatttgctttcctccaaacaccattagggtaagaaatgctgatacataaaggaacaagagagcagcgggtcacactttattggttgtatagtaccaaagccaaagctaatttaaaagtccttaaaattttacatacacacacacacacacacacacccctatgccccacacaattcatgtgtctatgaagaattttccaaacacgtggagaccataaccccatttcccttgccttaatagtgaggagacttatgtattccactaaaccaatatttttattacttttttgtcctgtgtcctaatttttattatctttaaaaaaggaagaagaagaaagagagagggttccatgggataaaatccttttatggtgggtcctatgttttgctgcagtacttgactgggactttcatcgacgcagccagtctcagcaaccttatttccaatatttaaagtacacatgaaagaaattataattctgtggagattatatagtttagaactggttccttccctttaaaactggacaagttctagtgcagaaaaaaaggggaaacttttaaatgactacatagacagtgatggaaataaaaggggattctcttataaatccaaaattgcaggtagaatttgatcattttatttccagctttgggatacatgttttggactagtgcttgaaatatatatataggacctgggaaatggtcccaccaacaagtggcattttcttttggggcctgctagcctaacctttcctgcaaggtaaatgtgtacaagtttaaataaagaaaatgattgcacccattagaactttaatgggaccaacatagaggtaatctgataaaaagttaagacagtctctttggtgatgtatggaattgacttccaatatttgcttccaattttagttttgcagaatcctgctataggaaaaatggagctgttcggtgcatttgtaacgaaaattatgctggacctaactgtgaaaggtaagccaataaaattctctattttctgtgtgggtcaaaggaagctttctgtttctcacactcaacagctctgccatactcccattcagtgggtcctgaaggagatgcttaagagtggttgagggactgcatttcaaaaccccttagggaagttttcctaaatcccatcccccagatacagcaaataacaatatgcttcctagggcttcaggccaaggccacatctcaggataagcacacagggaaaaaggaaattgaggatgtgtattttgaaaagattctctagatggttttggtagtactcttttctctctccatcaatgagaaatagtactaaaattagtgttccccagaaaagagtgaggtttcctcagtaaataaaatgtgaatcaccttttgtcaatagagcaataaattagaaaaaaacaacccacaaagctgttatttcgcccattctttataccagctttataccatactaaaaagtaaacaaattccacaggagtttaggttttctggatctctggctggtatttacatatgacactcttttctttttttccttatttttttcaattatattttaagttctgggatacatgtgcagaacgtgcaggtttcttacataggtatacacgtgccatggtggtttgctgcacccatcaacccgtcatccacattaggtatttctcctaatgctatccctccccttgccccccacccactgacaggccccggtatgtgatgttcccctccctgtgcccatgtgttctcattgttcaactcccacttatgagtgagaacatgtggtgtttggttttctgttcctgtgttagtttgttaagaatgacggtttccagcttcatccatgtccctgcaaaggacataaactcatccttttttatgactgcatagtattccatggtgtatatgtgccacattttctttatccagtctatcattgatgggcatttgggttggttccaagtctttgctattgtgaatagtgctgcaataaacatatgtgtgcatgtgtctttatagtagaatgatttataatcctttgggtatatacccagtaatgggattgctgggtcaaatggtaattctggttctagatccttgaggaatcaccacactgtcttccacaatggttgaattaatttacacttccaccaacagtgtaaaagcattcctatttctccacatcctctccagcatctgttgttacctgactttttaatgattgccattctaactggtgtgagatggtatctcattgtggttttgatttgcatttctctaatgaccagtgatgatgagctttttttcatatgtttgttggccacataaatgtcttcttttgaaaagcacatgacactcttttctctctttttctaaactgctctgggctttgctcatgtaagaaaggccttctccacagagcacgagaggctttccactgaatgactcggtaagatatttcccattccctccacctgccagctgctcgcagtgttgtaagataaaatggcttttgctcaaagagtctctcagacaggttttcttgtttttaacagaaatgccattagcattggcctcaccattgtgtttaggcagctaaacgatatgtagtgccctagagacagggaaggaagagccaagcggaaatagtcaagcacccagtcactcatctgcaggccctcaacagcacagatgggctcacaaactcaacctggggcttaaaatgtaaactttaaattataagcaatctcacttccaaagaaaacaccctctatctctcaaaaagtgggtctgaaactcaaaaaaaaaaaagccacagtatctgtgatacagagaaaaatctttgcacttggaaggcattgttattatgattattaaatatgcaaaatgtggataattatttcactaaaggattgtggatttttttgaatttatttatttattgccataagagggaaagcgagcttagggtccacatgaatttcatctattaggagggactgacagagatgatcgattacattgggttgattgaaatttgtgacacacttatcctatatttccttacttggagacacaggaataggaggcacctgatttactcattttctggctcactggaggtctgtggcggttgttaatcagccaggatggagttttttctcctcagtgtctgaggttaaattcaatttagtttgataatgaccaagcagtattgctaatgggtgttcaatggcccccacggggagagttaatggccttagatagagccctgctgaccaaatgcaaagctcgcagaagtgaaatcacctggaccctaagggcacagtcctgtaaaatcacacaggggtgcagagaagggttctgtcatcccaaaccatcagcaggactgcacgcccacctctgacaaggaattacagatgataaatgcctcagcccacataggatgctcatgagctctgccattacccagtaaggctgggtcagatctgctgctggagtggaaggctccagacaagagcactggtttggaaagtgaaagtagagtgttgaaaagaagagatttgagcattagcctgggtgagtgtgaatctcagctccaccactttgtgacccacccgggcaagttctttgacctctccaagtggcaatttccacttgtacagaatggagaaaataaagttacctgtctcataaaactgttatgagataatactgcaaagttttgagtgtgggacctggcactgagtaaatgctcaataagaattaacaggtgacagtatgagtcatggtggtcattgtccaacttctgccactgccgattgtgttcctgggacacgttggctcatttccctgagtctcggtttccttagctagaaattacagctctgagctaaatagtgccactgattaattatcacttatgtccttgttgctttacattcttcatctgtcatcttcacagccaccttagagaaggttgtattttgtcatcttgcagatgaggaaactgagccagaagagctatgtcttccaaattgcggtggtctttgctgcttttgatttgtttgaccctggggttaagaggagggtttctgcttgaacagccaagctcttaagttgcctgagttaaccttcgcctaatctgtgctttcaatgtatttgtgaacttgaacctctccaaaagagcttttctaaatatgcaactgatttgtatggatatctgttttaaacaaaggtaataattagtccaaaccaagaacctgctaggtctttttgcactttagagatcattgagtcaagtggtggttttaaaatctgtgtccaactgtctccaggaaaactttggattcctgagccctccccaactccccttcaccacccactgaaaaagaatatccagggctgaggcccaggacctgtattttgacttcccgtcggattctcatgcaccaggactctcactgctttgtgaactaccgctctaccttgaccttcaataccacactctcatactagggaagtatttctcaaaccgtgacctaagaaccttggttgtccttggaaatgaaggttcaggagttctcagtgaatattttcctaattttatgtttaattttaataataactttaaggaaaacattcattgaaacatgttctggactttctgctgtgtcacgttataataagagaagatctccctcagtgctgggagaaaataacagaggtgacagtctgtcaatgacacattacagacaattggaggtcaagtggcatgacatcaaggcaaactgtaaaactaaagattccaaaatgaaaattggtgagagacatgagtcgtcacatggcacatggctggatttgcatgctgaacacaggcagtctctaccacatcattttgcaagtggacatttggttataagacaacatcaattattgaattaatgtgaatctgaaattgattagtttcatagttttatttatgttgtatttgaaaatttattttggttttcaagacatgtaaaaaccatagacataaggagtttctacctagcttcatgtttgaaatatttaaagataatttaagctaacactggaaggggtattacatgaaaatgcttttccttttaaaaggatccatgttacatgcaaattcgcgaaacactggtctaaaacataaaacatgttttacttactctacctcttacactactgtgtaaaaaaacagctcaaacacgcccacctgccttgtcttaacaattaggtccatgaatattggcctgctctgggccctacctgtctttcctccctaaaaaccttctcccacctcacactttaaactccccgtgttggacatgctactcaccaaatccaccagatcagctggcaagctttccacattgtattgtatttagaccatgatcatgatgataaaaataataacatttattaagtacttactgggtggtatgtcaggcactgttgtaaaaactttacagacaatgatttaagcctcaaaagagccccaaaaatcctatggaataccattttcatccttatttacagaggaagaaatgcgacataatttaagtcacctgctcagaatcacacaatggcttctttatctgtgaaactatgagctgcttgacagacacagcntcatatcccttatccctcctctgtctattcttccctcagcacactatctggcatgttgaaggcctcagttgtttttatttaagtaaaaatattttttctcaataagaaatagcaacagcacttttcatgttcctttaaaaaaggtactatgtagtgacaggagtcagtcattccttgccctgttttacccccaatctcccaccccattccaggaaaatggaaagggtgacccagagttgactgagtctggctgaatagagattgcaaatggaagttgtcttctgatgcaaataattgtaaaatgcacaagccttgtagagttttgcaattctcatcctcatcccagtaggaacaactaagaacattttgaagatgaggtgctcccttgggcagcatatatactaaaattggaacaacccagagaagattagcatggcctctgtgcaagggtgatgtgcagaatcgtgaagcagcccacattttttatcctgcatgttctcccacatatgaggaagctaaaaaaaattgagctcatagaagtagagagaataattctgattattagaggctgggaaaggtggcaggtggtaagtgatgggggaaggatagggaaatgctggttaacggacacaaacttacagctagatgggagaaataatttgtagctttctacagcattctagggtgaatatagttaataatttagtttctgttttcaaaaagctagaaaagaggattctgaatgttcacaatacacagaaatgataaatgttctaggtgatgagatattaattaccctgatttggtcattatacatggtacacatgtatgggaatatcactctgtatcccataaatatgtatcattacctgtcaagaaaaaaataaaagggaaaaaaatccttgcccaagactcaccagcttcacctgcccccaaatatatatagcagtgtgtgtagtgtgtgtgtgtgtgtgtgtgtgtgtgtacttagttcatttaaaaagatgaggaacctgagactctgagccatgaagtgacttaatctaacatcacacaattgggttagcaagaaatccaaaactaaaacccaagaccctcaacgttcaataccattttcagtcatatgatctcaatgtttcagtattccacactgcctcccatagcagctttaatagtatactttcatgcattaaatttggtggtggagtgagaaacatgctaagactacatgatgattgatcatgtgaatcttgttgcttaaagatcagaagaaaagaatggggcaaattaaagcaaatccaaagtgacttaaacccctaacagaaaaggcagaacacagtatcatcagagatgaagatgataatcataatgatttcaatgatggccttgataatggaaaagaaaaataaggaagaagaacaagagaaagctaacctttattgaggtttactgtgatgcggggatttagtctaattctctctgaagacatcaagtttttcacacgtagaccctgttgtttgcatagagttcttatgattccttactctctagcttgctcaactcctgaattcttgccctgtgaccctgaataggttacatacgttttcctagccttatttctcagtctttcataaagaagtggagagcatttacatagcacctactttggaacaagttctttttttttatgtcattttatttaatcccaaagacagctacagagtgacatccctcccagaaaggtttctgagccacctagcccaggagtttgggcactcttgacaaagactttcagtgccagctgtatagccctgggaggaggagcagaagagaaagagaaagggcaggcagagcagggggagcttcaagcattcctgaaacagtttttggtcaaaataatctttttttctaaacatcatatcttttggttttccattttgcccaaataataaaatcactaaccaaaatgacaaagttcatatgccacaatcctttcatttgagccataaacttaccagttctgttttccttggatggatcaagtcattaatagactagaaatgagattacggaagaaaaaataggaccaggctactgggcaccagggctccaatgcttactctaaactcaaatactggtgcttttgtgtctttgttgttagttctttgagggcaggcttgggcacttttataatcactaatttattaattagttcattctttaatgctagactgctggagtggaaagaacattaagcctggagtcccacagaggtttgagctatgcagcaatgaacaagtcatttagcttctctgccttctagctttcttatatataaaagtaggggtttgtcagggactatcataagtaaacttttgtatgctcattttgttaaatccatagggtccagagttttgactaaaacttcagagtttcctctaaacctaccaccagaagatgttcttaagactcagagtaactcaaagtaggtttccactgtgatagagattccaacttacagaatagaaaatttgagttttctcttgtaaaagaccaggggacctcctatggagagcaaatgcagtggaattaaatgaaaaagttactggcatctgacctctatgagcttgggcaagccccttcactcccagaccttaagattcccagccacacattgagctggtagatctgagtctcatttcagtcggccaaagagcctaatattctctgtttggtgaacttcagcaaaggccagaaattcaatccagccacaagttccatagaggaataatttatgctggcttagggacctgcaggcctataaatctgaggtgcaaagacatgagaaagtgcgaataacaacactcattgaatatttcctcttggggtgtctctttgtgggttgtgtagaatttacattcatccccatctttttcatagaccagatttctagagttcatattctgtatcattatggttaatttatttcctgttctttcagagaatgggctatgtgtttttcttcatcctgtctccctctatgtcttacataaaatggacatgaattgtccttgtgttggatgaatccactcattcatttatagcagcagcagtgtggtccagggtggagcaaaagaaagaactccagggtcagaaggtttggaccttgcactgtgactttccagctatgtgaccctggaaaactgaagtagcctcccagaatgccaggcctgtgtggcctccctcccagggtgtctgtggtaactaaataaactcacatagatgaagctatgaggttcgatgcaggtaaagagtttaaagactgaccatatcctatcactacaactacaccaagaaactgagacatgggaacagaggctgaaggaacatacacaaaatgttgacagtgacttttttagggtcctgggattacagatgtgatttttttttatgtatctgtttttcaaatgttctgaatcatgattcccttactttaaagggaatcctttaaaaaaaatgtagtgttttattattactggccagggcttgttgatttccttggaaagctctcccttcctttccactcccaaggccaacaccccagcccaggccctctataccccaccccatccctctgctccagcctgaagtccatcctgcatgctgaagccagcaccagcttccttcactaccacttccatcatgctcaaaaccctttgctggctctctttctttttccctctcatgcaacagaactaacttctctaccctaccttcaatcccattatggtgtgaccacatgttctttccagctactctcaaagtgtctgcagctccagttggcccatcttccacactagtttagagtccacagcaaaagagagtgcacaatcagccaacaagcatgtagtttgacttgtacagtactcttacaaggtttgaatcaacttttaaaaattgcaatttcacataaacatccaaatttccacttttttctccaaaaataaaatatggcaacataggtccttcatcctctcaaggctctaggctggcaacaatcaacttgagcctagtaacagctcttcccttacatggggcctacaggcccaccactcacagcagggcctctgctgccctgcacggcagctttgggaaaagtagggaaaggcatttcttcctctgggcagagacagcctcacctagagtgcacagcttggcaaggcaagcaaaggctagatggatttcagtctccattctccaactcagctgggctctctcatcaaaggcccagccagcctgaccataggcactggctctgcccacacaataaatgcaggtaggcacctggcctctgtaggtgcgcatatctaaaacatccagaagaatggcagtctgggctccaactccattgatctgtggtactctcagctctgccatctgctttgactccaggctggctttgctcagttacaagttgctgccaggagctaagcgtactacctgctgcctcttccttcacctgaagatggagagaatgccaccccatgaccctcaaacaagagcccaagctacactcctgagtcaatccctttcagccaggagaatagcaggcactgaatggctcaagcttagttacttaaacaattcattgtgactagactgatcaatgtttctcaatagaggtgctattaacgttgtggctaggacatttcccagctgtacgctacaggtacatctcattgcagtacctttggcatatctggtcccacccatcatatatcatttgtgtacaccagttccctggctggatataccagttcaatcctatagctggaagcctggctgaactgaatggcctacagatgaagtgaaccaaatgatctataacataatggggaggggtagttccttaaaaacgaaatctggtcctatgaagaagatgagagagtgcaaatgaattctgggagggaaatcaataaatatccactacatctttcttctttgtaggaaagaagattaaaaggaagaaaaaccatgatgctaaatatttaaatgtgtgatattcctcttcagatgtgctcccggttactatggaaaccccttactcattggaagcacctgtaagaaatgtgactgcagtggaaattcagatcccaacctgatctttgaagattgtgatgaagtcactggccagtgtaggaattgcttacgcaacaccaccggattcaagtgtgaacgttgcgctcctggctactatggggacgccaggatagccaagaactgtgcaggtgcagtatcataaatactaagccagctgcctggccagcatgaccctctgccaatactgaatttagatgaagaatttctcttggggaagtattgtgagtgcccccttgtcactttcccagggcaatgtacattctcaggaatatgcatcccaaacccatcagggatagaaatttttatcaaggctactaatataattttgctcatgggtggaataaactaggagacacaaacacaacaaatgaacttttgtcttagcatcttatatccttctagttttaatcaaagaaataaatcggacttctatggattacctgccattaaccaggagactgaatgaaatcttgcatggttcaggccaggcatggtggctcactcctgtaatcccagcactttgggaggctgaggtgggtggatggcttgaggccaggagtttgagaccagcctggcaaacatggcaaaaccttgtctctactaaaaatacaaaaattagctgggcatggtggtgggtgcctatagtcccacccagcatcccttgaacccaggaggtggaggcagaggttgccatgagtcaagattgtgccaccgcactccagcctgtgtgacagagagattcttctctgaaagagagaaagaaagaaagaaagaggaaagaaagaaagaaagaaagaaagaaagaaagaaagaaaggaaagaaagaaagaaagaaagaaagaaagaaagaaagaaagaaagaaagaaagaaagaaagaaagaaagaaagaaaaagaaaccttgcatggttcaaatcagttttcttattcagagggctatatctctcgttcagttatgtttggtaaaatcaagatttccataaaatagattagcaagtcaagggtaccatttaatcaccaccatcctccaatttcctcaaattataagaggtaaatatttcaaagatagcatagaaaactttctggttaggcttcagttagactgaaacgcacagatcttattcatccatttgccacatagagtgaagctcttcaaaagtgaggtgacattgctttcctctaagagtacaggaaggctgagattgagtatgtcttactcttatgtgactttgaggggagagtgggagagcaggaaatattgtactcctgtggcatgcctctataaggaattctttcactgaaacagatttccacttgaaaagattcaaggagtaaggagttttaaataaaaaaaatgcaacatatatgttctgcagaagtcacaataaaagtaaacatgtctacaaaaaagcaatgtgcatagaggcataacactgagaatgacagcagaaaggaaggagcactgtgtctagtcaggctaaagagagagaaggcggacagcagaaataatgttggcaaaatcaaagcctgaaaggttgacatcctgattctcaaaacatttactaaatttgtgtttaaactataaagatgcaggtcactcttggaagagaagctaattttagaagcaataaagcatgatcttgctgaaagatttaataaatctgcattttgtggaacattaaacagatgaaatgtaataaatagatctcccatgaacctggtttttatgattattctgtaaagacagttaagaagtggggggaaatgcacaattctattccagttaattgctagcatagatggtaagagaattcctctttaaatattacaaattagttcccacccagaaactcagtggaaattgaacagtctgatgagattgggcttttgtttttgctttttccaaaaggcattacagaaaatcatcagtagatgaataatgggctcccacgtcttctaaattcatgtaaaaatgttcctgattccttgcagcacattattcttattgcactcatagctgtcatttggaggtttggagtctgtcttgccaagggtcaagcgcagtgggagccaagaatcgctcctgggcctcctcactcactccttgctaagctgctcctccctcacacctggcaatgatcaacccccgagttaaattaaactggagtatcagtctgcaaggaagggatggctttcaatttccagttgaatgatgagctcgtggtcatttagtatcttgtgaaacttaccaggacatttttggactaaagcaattgcactgtcatgtcagaatcccaaagagttgggagagaaatcctagaaaacttagattcaattttgcccagggtcacctttgaaaatctcattgggctggagcttaatcggatgaagggcgtaatctctgtatcgtagattctacacagtctgaaggaagaatgtaattaattcccattgatgaattatacactgatagctagtgtttctagaaaccaggaaaatattgccatattttaagcattaagaagtgcatttctcgtctcttgtttttgtttcccacagtgtgcaactgcgggggaggcccatgtgacagtgtaaccggagaatgcttggaagaaggttttgaaccccctacaggcatggactgcccaaccataagtaaaaataacagtacatgattgactaaccccactttctctaatgtgctgcaggtgtgggattaagaaaagctatgcaatatcactctctagaaactgctgagtcccacccctggacttaaccctttctgcacctcagcaaatggagcctgcaccaagtacttggtggtccacttgattccctagggcaaatgggtggtttacatttgcatagctctattttatccagtctttacattcagaatcttacctaatggctaaaggcaaagtcagaaacacaactcccagtgacagagctcttttcagctccttttcctatatcgtctcttcaggtccctgaaaatacgacgtacaaacaatttacaacacctggggaaactgagataccaagagatttaagtggcttctcccaagttacctcaaatctgaagtgggagcagaagtaaatattcaggctttacaaaatggaactgccttttatctctcctggttttctctggctctcctgttaattaaatcatgaggagttacactaggaacaaaacttttggtttaaaaactattttaatagtaggcatcccctcccccaaacagatgtatcttggtctctcagtccctcggagcagacgagattaaccttaccattggattacatcttagaagatgccataggatgtgaggcacaagtaatgccaagtttacaccctgattgaacaggtggcccctagacaaggccaatttaagaacatcaagatgcctgcctggtcctaagcatctcccccaccaagcctgaagtactggctgggaatcattcccttgagagagcttataagtaaaaccatgttaaacttcaaataacaaattaacatattaacaaccattaacacgccagtctccctttatcacgtctctagaagagagcaccatctgagggaaagagatcgggaacaggcacgttgcaaaaggtgatcaaggcagttctgaaacacagagtgccatccttgtgagtgtgtcacaggagggccctgggttctggaggtgatgacagtggtcagaggaactcaaatgtgaaaagtgagaagtgatgaggaactgggacctgcctccccatgtgcccacgttcagcctgaactttggtaccctcatcagatgtcaggaagcgactctcgcagcgataacctcagacctcccggtgctgaagtgttcatcctgccaggaagtggggctgtgaggaggagctgtgccctccctggggtggggagaaggctggtgctagcccctgaatactgagaaaagctaataggagaggaggagcgtctagccaatagccatcttcactagctaatgccaagcaagatactaaagcctgacaagaatagaattacagctcttcatgagacaaaaataaaaatggtattaaccaaggaaatagagatttatgttctgctaaaacggcctgcctttagcatgcttttgacttgtgattctgaagaaatgtttcacctccaggctgtgataagtgcgtctgggacctgactgatgacctgcggttagcagcgctctccatcgaggaaggcaaatccggggtgctgagcgtatcctctggggccgccgctcataggcacgtgaatgaaatcaacgccaccatctacctcctcaaagtacgcaggaatgttctactttccactctgttttcatcctggcttcacaggcccgcagctagtaattccttctacccctttttgtatctgagtctcatacctgtattacaggttgttagacctgtaggtctaacatagaaaacataagtaatttcataggaaattatgaaaagttgattgtaactatgagcttgggccaaaacaagaactactgtctacaaaagaggttatatgggaaatgaaatgactaaaagactagtatctatgcccaaaactactgaggaaagagaaacacttatttccttggcgcagccatacattacttgtttaagtcattaccacaaaaggtactgcaaggctaccatttccttagccttaatttgcaaggttttgagtttgtctagaagcatccttcttcttctctgtctctcctcaccccaccacccacccacctttccttcttatttacacacattctctctcattttctcatactcacagtcaaacgcagacattcacacacaccttgtttctcctcatagctctactggttaatacctagtaaacaagttaaaagcagccaacagattaaaaaacaaaaacagtaatacagttggccctccatatccacaggttccacatcctcagattcaaccaatcacagatagaaaatatattttataaaaacaataaaaaataatgcaacaattaaaaaagaaaaatacagtgtaacaactatttacacagcattgacattgtgttagtattataagtggtattataagtaatctagagatgatttaaagtattctggaggatgtgcatacattatctgcaaatactaggccattttgtatcaggaactggagcatccccacggggtcctgggaccaatctcccacaactaccaagggatgactatataaaggtccttgtatagctaagatttacaagttttctttcccactaaatcatgggcttctatcacaacaaaaggatatttttaaaataataatcattagctgagggaaaatggaattcaataccagcacattgttttgctttgttagtcaatttaggaaaatgattgagagcatggacgttgaaactaggttgcttgtattcaaatcccagctctgacacccactagctgtgtgaccgtaggtaagttatttaacctctataattcctcagtttcctgaataattattgcctctatctcatgagctgttgagagaattcagtgaattgatatatgtacagaagttagaacagtacctggcatactaagtactcattgctttttggaggtgcaaatgatatccatagcagttggccaaatatgtaaagtgtaagcaaaaacaaaaattgtattgtagcctggatagaatcttggtgtgaattttattctaaactttgaaattgttcttgtccaaaattacctgttggaacacatgaagacactaccccccaggggagtcacccagatccaggcctcctgaaaccactcagattctctttcctcaaaggcacaacttcaagacaggaatcattatggcagacaggaagtcagtgtcaagattgaagggctcactcccaagtaatctcagtaaagccgcatttagacccaactcctcgaaaatgaaaaaggagaaagccaggggtctgaaataaagagacttgcattaaaatgaggaaagttaatttctatactccatttacatcaatactgatgggttggtcagttcttccagacctaacaaaattaaaattctaaagctcagacacccagggccaccaccagcctatattgtacctttgtacaaattagaaaaaggagccctttccccatggtcaacccagcccctgaccagcatccctggtctagtgagtggagcttgcagaattttagcccctaagggcctcagtcccctctgcagaccccacccttcatatcaggctgcagcagcctgcggaccccactattttgagaaaagagcctcacactctactctgagtcctcttacactgaaagagttttatgtacattttttaaaacctggtgtgcccattgactattctcaaaacacattcttctgcagacaaaattgtcagaaagagaaaaccaatacgccctaagaaagatacaaatcaacaatgctgagaacacgatgaaaagccttctgtctgacgtagaggaattagttgaaaaggtacgtatgtatgtattcagtttctgggacagccttcaaagaaaggatttagctgatgtgaggctggctggtcacaaacgactgaggcttaacacagcccagaaaaaatgcagtgacccatgtgccttaaaataaatcaagaccagacctgtggagaaagttaacatactcagtctctaccgtctcctctcgttttgattgtttttcttgaaaagctatgtttgtggagaattttctgtgtatttgcggtgggttgatacggttgatttgtttaattaggatggtcattcaggtgtttgccaaggcatcttatgactaagagctacagagcatccagaattaaaatttattatatagaatataaaatttaaatattggttaaagtatacattaaatgataaatggaaagaaagggaattgtcctgagaaagcaatttcgctctttggcagggaaaaaaccactttcaaccatcactttataccacagactaaaataaattagcccgtttaaagagttgagtataaatctcaaatccacaagaaaatagaacaaactacttattaaatcttcaaagggaataacagaacacttaaatacaacataaagaatttcaataaaaagatagatttgacaagataaaatttcaaatatccaataaaacaactaaataaacaaaaaagacaactagacagagaaaaatattgagaaaaatacaacttgtaaaagctgtcaggaattaacaggaaaaacattaaaacatgagcagagtcaatgtgaaaggctattcaacgcactccgcaacagcctaatggaaaaacatccatccatgtgctatactaattttacaaactaagtcacgaggcaccatatttagcatattagaatgtttaacacagtttttttttttttttctaatgatattccaccagtactggccagagtacttcagaattgccgctttccaaaactggtagttgacattataaacaattctcatgatcaacaaaaattttaaaaaaataaaataacaatagtattctcttttgaccttggaccccaaaccctttaagagattatcatgaaaattgtgtccctagttcccggcaatggcacatattaatccaaccactagtgcttgaagagcagtgaaatctcttaaatagtaaaggaaataccaagaaataaatatttgtggaaactcattgttacttcatgttggtatcagatatggttgaaacttgctaaaactatcttaattcttttttctttttttttttttttttttgagatggagtctcgctttgttgcccaggctggagtgcagtggcgtgatctcggctcactgcagcctccgcctcccgggttccagtgattctcctgcctcagcctcctgggtagctgggattacaggcacacaccaccacgcctggctaatttttgtatttttagtaaagacagagtttcaccatgttagccaggctggtctcaaactcttgacctcaggtgatcagctcacctcagcctcccaaagtgctaggattacaggcatgaaccaccacgcccagccttaattctttcttgaggaaagaattttcaagaaaacatctgaggaaatgttttcaccaagattagctcctcccacagcccaggcagaattcctgatccttttgttgtacaatttccccacttctaatgtaagctaaatgcaggctttcgtggagaggaaataatgtacgcttgaaagttaacatcacagtagaaaaggctcccggacaagaagggcagaccaccaacacaggaggttgatgataaagctactaggaactttcacccagctgtttccatctatttttattgaatataatgttctgaccacagtcctgatggtgcaaaaacctgctgaaacatttcaaaacaaatgcccagggctggtcttaatgactttttaagcattcttcaagcccttgctctagaaaagtccatgactgattcttagatttaaggaaagctgtgtcttagaaagccttctatcaagaaagtaactaatatttggctttaaatagagtaaaggagttcattgtgtataaaaatcagtaatattgccccttgaacttgataagtaataccactttttgcaaattacctgccacatggatttcatgtgacccaaatctcacaagttacatccacctagctacgggttttgtctgaacttccctttctaaattctccagccttctactgggaagtcctacagccctttcccaccacttatgtctgggattcccctaaaggatgcccatccatctgtgttcataaatacccagtgctcaaaagatgctccctttggtgctgctgatcttgtctgcaatgaaaattccaaagatcgtgccaagattctacttttccatgttcccagagccactgtgctcaaggtcagagtgtcactgggctacaagcagaggtgagatgtggccctctcccaatctcagtgctgcccctcaccatctggatcttgaaggtccactgcagagcccagagttacaaagcacagtctccaagggcggctcaggaggtactgcaccatctcctccacttctactccttgaaccacagcagaagctacctgaatgacaactcatgcagagagacccacaggactaaaaggaaagtaggctatctccaagcatcaaaagcatctgaacctcatctctggtcctgccaaaaaggcaggagaaaattaagtacagttggccctctgtattcatagattcaatcatggcttaaaaatatttggaaaaattccacaaagttccaaaacgcaaaatacaaatttaccatatgctgagtattactttgaatccatatgaacgaagtgatgtataggcattgcattaggtattagaggtaatttagatataatatatatagggggatgtgcataggttatagtattgcaaatactacaccattctatgtaagaaacttgaacaaccatgaattttggtatctgtggggtcctggaaccaatctcccatggatgctgagggataactgtttacatttctattccagaagcattattgaacatctgtatataatatttatttatttatttatttatttatttatttattttcagacagagtctcgctctgtcatctaggctggtgtgcagtggcgcaatctcggctcactgcaacctctgcctcctgggttcaagcaattctcctgcctcagcctcctgagtagctgggattacaggcatgtgccaccacgtccggctactttttgtatttttagtagagatggggcttcaccatgttggtcaggttggtctcaaattcctgacctcgtgatccacccgcctcggcctcccaaagtgctggaattacaggcgtgagccaccgcgcccggcctgtgacagttagtgtgctaggtgctaggtatcctgaaatataataaggccctgttttcaagatgcttcagtctagcagggaaacagataagtaaaaacataattatgatacagcatttaataagagaaacatggtacaggctaaacggtaactctaaggaagaaatagtgaaatattttggcatgggtacactaggaaaggcttctcagagaaggtgagtattggcctgtatattgagaatgagtaggagtttatcagatactcccaagcaaggggtaagtactatgagaacagatagatgtgaagcagcgtgctaagttcttgggactggaactgtggccttgtggaagattcattgtaaggcagagagaggaggagataatgctgaagaagctgtcagaggcccaattgtgaagaaccttcccaaacacgctcgtgaacatggggacttcagcctgtggactctggaagtcattcaggtatttacccagaacaatgagctgattagatttgcactttagaaacgtccctctgcagtgtggatgatagactagccagtgaagactgacaataggggcactgcttaggagaccgccacagtggtctagagaagagagcagtgggttgctgtcttgccttcatttgaaaagaatttgcacagaacaaggatgaactgagactgtggtcatggaaaagaggaagagaggccagagtggcaggtggaatgaaacagacttggtgaccagttggaggtgagaaatggcaaagagagaagctccatcctgagacgtggatgactaagactacgaacacgaatggattactctggacattttaaaagtgaaatatctgtgatggcacagagggcagatagagatgtgaatctgcaattcagagggtaatcagggctggaaaggaatttagggtcattaatgtttaggaggtaggcagaagtagatattactgtacaaattctgaagtagcacaccaatattcctactattggtttgtccaggactgttgctgtttatgcttgtgtcccagaataattactaaaagttctccctttcatgtgcaaaaatgccccaggttgaaccataaaatatatgatcaccctagatattggttatcatcctcacgtcatctaccttttatgtactatattaccaagacatccttgccacttttatgtcaaatatgtacaagaagaattttctgttgagatgagcaaatgactaatacatttgtaatgtaaaccaccaactagtttacagttacaaggtaattttttaatttcagcttttcttaaaccgaggcgcacctgttttcccacgtgcctatatcattattttccttccacaggcaaagttacaggaaaaataaacattcatataagccatcactataggttcaattcagtcatcttacaatgtaaaggaatagatgttcctctttgccactgatccagtcatatatacagtatatcaatagctatatatctctatctacctgtatcttagcgccctctggcgtttgtcaaaaagaagaggttttcttataggcatgacatttttcagctgtctctcatcacttcaactgaagtttccatatcaaaaaataataagtttaatgacataggaataacaatagagctttactctgaagtatcaagccaaagtaaaaactaggggtgttgtgctttgcaaatataacttaaactggatcaaagatcaactcattaaaaattctaaaattttaaatgcttgtgtccgtattttttaaaagcagggaggagtaatattaagatttattatagtttctgcatatttaattttaaaatgaccacaaatactgtttttctggaaagcactggaacaagccaagaagaagactggaattgcaggaaggagtataatgactcagaagacagtgtccattcagagagcccacagtttatgaagggactgatgaccacattgccgctgcacagtgggctctgtgactacaggagccttgctctgtagggaggggattacccttctccaataaaaagcctctgggcatgtgtttgttataataccatttctgcattctcttccttgaccatctgagagggccacttgcttgggttattcctggagagtgtaaaaacgttcccggtaaaatcatggcataatcctctgggtagaatactggatgaaaggagagaagtttaaaacaaccacttccctatcctcaggaaactctgtataatgggtctaccagcgctctgtgtggcagatcaccccacagctccttcacgtattgtagcagtttttaaagagctgagccaaaaaagcaacagacaaggcaagtgggcattcgaccaaatgccagactaaagaacttctcttcctcttaaatataacccatagatcagtccttcaaatcccaaaagtaagtacatgtcgcccatgctgtgcatacagggtggtgtcctagccttgaatcatttctgtgctcttagatcacattctgtccttcaccacgcacacaaaaacacacacatacacacagacgcccacacaaaccctttcttcagaggccacatttgagttgggcattatttttgacaaatactgtgtgagatctctgaaacagaatctcccaagttgagagaatggaatcagcttctcggagaagagctccattcacgctgagccaaatctgcttgagcagttatttgtacacaagtgccatcaatgttgatgggaatttggaatgaagcactgaaaacagcatgttaggccagtgagaataatccttgaaatctctgtggtaattcaatttcagcagtggttggaccacccaggagccactggaagcatggtgcatttcaaggtctgcctattttttcaacaattttctctttgaaactttaagctcttcagtcagcacaatgtcaaaatgataagcagacatgggcaattttctagtccagcaacttgagatacagtaaaaatttgaagaataaattacatatgaaaggcagttggttgggactgaactgtgactgatgatataggaatagcaccagattttatagcattctgtcattctaaaactggccatcaagtgaagtaacttaggaatggaaaaccaaacattgtatgtcctaactgatacgtgggagctaagctatgaggacgcagaggcataagaatgatacaatggactttggggacttgcagggaagagtggagtggggagggataaaagactacaaatatggtgcagtgtatactgctcgggtgatgggtgcaccaaagtctaacaaatcaccactaaagaacttactcatgtaaccaaataccacctataccccaataacttacggaaaaattaaaaaattttttaaaagtaaaactggccatcacattacctttcatgcattatttttgggatgatttcatgtgttatagaactttcacatgccaggaagatttacgtttaggaaatacattatgcccacccacccctatctgtgcttatacaacattcttttctcatacatttaatctagcctttatacggattatttgtaggaaaatcaagcctccagaaaaggacaacttgttcagaaggaaagcatggacaccattaaccacgcaagtcagctggtagagcaagcccatgatatgagggataaaatccaaggtaaatatattctcttctggttcagtttaatatcaaggaaacacttatgttattaacatcagtaggcataatggctactgttaagtgtttgctgtgtgccaggaacttgttggtacagtattataggtttaaacttgtataaggtcttcatttcaagtttgtttatctggaatttctgagcactcatccctacttactatctgttgatgttcaataatcaatgtataaaatcattccctttttaggcatttcacagaataaccttctgacagaggagattgcatgctgtggtgtctctaaaatgcaagagttgagtaggagtcacagatttttctcagttatttgcagagaaaacattgcttttagaatgccagtaaactatcagttgacccaaatcatcacaagctctttctatgatgggctttcccaaaggccaatcaggcaacatgcttgggccccaacccagaagaaaaggaaggagcggggctgtgggagatttctttgtcctaaagcattgtgaatgattgtaccttccctcttggaggtttgcttaatttgtgctctcacttgcaatacatgcaggataatcttgaagactattttaatagtgcactaatagttggccttcaatttaccagcagaaaacagcagatttcatctgttataggataaagaagatttccttgggtgagagtttgctaagatccagtatctgcatttccatagtttttattatactatatattaagggctggatgacaacaccaagtgcatcccagggcacagtagcgataaagggacccacagtggaagattcatgtctttatactggggcatattgcatgcaaagggatacataaaagcaagattaatcatttgtcatgtttcctttgatgtctattataaacaataaaagcaaatgacatgcaatccaaacactcctcactcacatactctctcatggctcatatttttgagtttcctgacaaaatattctttttctatagcattttagagttactattgatttgttcaaaaagtgagattgaacctagaagataacatgaccttatccaactaagaaataaatgcctctttaggcagcaaatgccaggaccctagtaagccattcagagaaaataattcacctttgctattataacccatgttttgattcaaaagtgtttcatttgcaaaggatctgaaccctcttatttgatcctttaagcatgggaaaagatgaaaaaatgcaaaggaaatgtaaatgggaaacaataacttctaacagcttttaaatttttaaaataatgtgtgaatcgtctccaaaaaccaaaggcaaaaatactattgtctgtatttcccttttctaatctatactgcaagtagctaaactaaaacaggccaaaattataaatataagacttgcaccaaaatgccagagaattcagcatcacaagtgctagagctgaggaaaaaatatttacatttagtttatttcgcaggttaatattttagactttacttgaggagtggatgtttaatccctttatataattctggaatgctgtaagacaccaattacatgtcattccttattcccaaccatctctaaaataaccgctggcgaccttcaagctattatccacataaaatacaaccccttatcctggtatgatttatgtgacaccaatgtttgtttacccatcttgtctggtcaaccacatagatcatagtaaaccacagacacgcaatttcatttatgccagcaagataaaatgcttcctcttggagctgcagtagaacaaggtgacaattacataccttccttctcatcatatgtagtaggaatgagggattcaaagacgtatttcagtctgctaatatttagacaggtcacctaatccctttgagcctcagtggtccctccagttctaaaattctccacctgacttatggaagtggggtgaaaatgacctagagtagtcacgctctagaaggcaaacagcaactgccaaaaaataactatcaatgagcaaaagctcacatcatattataacaaaccctcattttgtatttagcctgtgaaataatttgaaagactcatttggacagctatcaatatgctctcatttgggcttaaagctttgatcaaatctttgtctaaaatacaattaataactccacacattaataatctcacccatgacaggagtgatctctgagcattttctccaagttaagtatgttatataaaaggctgatcaaagactgtagatttggatgccttgaatatcaagttacaatatttaacgctaaatattagcattctcaaatcactgtggaaaccagatgaggatgagagcagagcaggctttgcattagccagttcccattctgaagaccccgcatgggaagcagagaagagtggtttcctcgtgtctttctccttcgtggaatagatgatgagcttccatgctcgctgggattcacagcatgaacactagcacgctgcttttgaatgagtctctctttccatttcaggatcagccctgccctttgcccacagcccttgctcccttgcatttctagtgcctggtcatctctccctgctgccttgtttcaccatgttcttcctttcagagatcaacaacaagatgctctattatggggaagagcatgaacttagccccaaggaaatctctgagaagctggtgttggcccagaagatgcttgaagagattagaagccgtcaaccatttttcacccaacgggagctcgtggatgaggaggcagatgaggcttacgaacgtaggtgtattcctctcatagctgacccagcacatgtttgccctctttgtgggtccaatagcagacattaaacctagggcaacatataatcaaagcaaccaatttccagtgttcagaactatttagaatctacatgtggccacagggaatcattcaggacaacttgactttataaccaagatttttagattcaggcccaattctgagcccctgagaaacaactgagatgccacaaggaatctatagcagttggtgaaaaacgtataaaacagtagaaggaagactaaaggaaaccaattcccagaactacatttaaagaaattttattgagaaggcaggaatgctacaaggccagaaacattcatgttgtgaagaccatgaatgactttaatatcttttagcctccagtggaaatttaacatttccttcagcaatgagtgtaggcaccaaatcacagtagtattattgaatctatcacttgatcactgtatcagttatcaattgctattataacaaggcccaggccgggcgtggtggctcatgcctgtaatcccagcactttgggaggccaaggtgggtggatcacaaggtcaggagttcgagaccagcctggccagtgtggtgaaaccccatctctactaaaaatacaaaaaatagctgggcgtggtggcatgtgcctgtagtcccagctactagggaggctgaggcaggagaatcgcttgaacctgggaggcggaggttgcagtgagccaagattgcacactgcactccagcctggtgacagagtgagactctgtcccaaaacaaaacaaaacaaaaaccaccccaaatgtattcatttaaaacaataaccatttattgctcatgctttcatgggttggcaattcaggctggattcaacctggacagctcatctctgctccatgtgacatatattggttgagctcactcagatgtctggggctggccgggaaggctgggcctctccctccatgtggggtcttaactcaacaaggctagtccaggttgttcacataacggcagctttaagagagcaagaatgaaaagcacacggtctcttaagcctaggcttggagctcagcaatgtcatatccattttactgatcaagaccagcccagactcaaggagtagagagatagactccactcttgattggaagagctgcaaacaattggtttaatctacacaatcaatggaagaaatcacagatttgcatattatattttagctgctgctgatatctcatgacactatttaaattcaccaataactcaaaattatggtaactattagatccacctttagatcttgttagttaagggattagtaaagaagcatatacattattatattacatttggtttttaaatatattagtctccttttaatttctatatattttattgtatgcattttagaacacactctaagaagcagtctgaaggcttcattagattacaaagggactaatgacacaaaaagggataaagggcagtaggtcgttttcctacaactgtcactatcaacttctgctaacaattattgtggatactgtagaaagacattactgacatacaggtttattatggtggcaaatatgtaaagtcttagaaacagtaagaaccaaagaagaatctcaggccccagttctgagtcagactcagaaaggctagagctcagatgtcagtcaatgccagatgtttccaagcttgtcacctcctgtggaatttaacaagacttccctggagaagtgggaccaatcacatctcccactcggcctccttccacctagaatgcattttccaacactttctatactcagccaggaacttttgtgttctgcttacagtgatggaagaaaatctcaacaagacaagctaatattccctgaagaaaacagaaattaacatattcaacatattcaacacatgtgcctttgagcagagaataaaagacacatgcaaagtttaagaatatcatgtcattgccatttaatcttttttccaccaaaatcatggtttggatttgacccagtggagctaactaaaaacagttgcctagagaaactacagaaaatgagtgggtatgaacatcattttgccttattaccgacaagataagtttggttatttttaatagtaaaaaccatactatacccaagtcccctttacacagtaaaattattaataatctggataataataagcatagtataatgatatggttttcacaaaaagcacaacctctgtgggaaaactaatcaaacccttctttcaactgacagttatccagggactcccaaactctaaaaagtagcattttttacttcaaatctaaaaggtggagctaattttgtgaacaatagcttcaatctccattgctaaagaaggcatggcctgagaattttgcaactttgcaaaatgctgggaggaatggaagcgaacaggagaaagccacactgagcctttatctccatttcttcccagtactgagccaggctgagagctggcagcggctgcacaatgagacccgcactctgtttcctgtcgtcctggagcagctggatgactacaatgctaagttgtcagatctccaggaagcacttgaccaggcccttaaccatgtcagggatgccgaagacatgaacagggccacagcagccaggcagcgggaccatgaggtacagcggacactcaccatcaatgcatttcagcatcagcagtgtgatggtacaccaagaaggggctgttgatataaatttttttaaaatattggtatagttaaatacttatattttaaaatattggtgtgttttttggtgctataaattactaacttgtgtgttcctaaaatcaagttgaaactaggataattgtctagttcttgctttgataagaacgcagtagttctgatgcttgtgtccatgtgtatgggtctgttattcttgcaagtgggtaagcaatgcatagctttttttatactgagagcactagaaggccaaagcatctcaaaaccatgggttctgggtatgcataatttttggaaaggcacgataagcaaatctcacagtctggctggtcagcagctgcagggataaggagactaattgccaaggccatgcaaatgcaaagaggaaggtgaggaggattcccagatgtgatcatagcttgcaaagatggtcatctcatggggccagaattcgtgcatgcccacacctacaaagctgagaactggtantggtcatgtgtccgcttcaagcaatgcatgtattcacagccgccagcatcaagaggggccatcttttgataggatgacacatgcatgttcaaacatattttaaaagattagggagaaaagaatactgtgaacaaatagaaaccaattatgagcaaattcacgaattcggttatgtactattgtggctggcaaaagccacttaaactaggctctctagcctgattttcagccatcattacccctcactaagaatccttgtaaaatttcttccgtaaaagttaattacactcatcaccactgtttgctaatgggagcaaacccctagccaatattttttagaataatatggttgggataactttttttttttttttttgctaaatgaatgcatgattatcttatacaataaaagtataacacaaaatactgttttaagatagtcgctgggactctccttacccttgaagtgtccccctttccctcctccacatccagtcaaccgcaggttcctcccaggtttactatctgacatgttttagctctcttccttcttttccattcctctacaacttctctagttctggctttcattgtttctcaaccaaaacagtctccccttctctctcctccattcttgcgtccttccaaaacatcctctccaccctgccagagcagctcaccttagtcacagtctgactgcaactgcatgtgcttatcaatcctctcatttctcctcatcacctataacagtgcttttgacgctgcaacttgtgagccatttcgcgggttagaaaataagtttcatgggttgtaaccagtagtttaaaaaaaaaaaaaaggagagacagataaaaggaaatgaaatcaagggaatagaaaatatcaaagtacacatatatagtaaggtgtggtttcatcacggttctgccttatatatgtgtaccaggttgcaacgtacaattctctgttaacctctgaaagacactatcctgtggacagcctatgctctttcacgtggcattcaggactccctctgatctgaccctaccagcctcctcagcctcacctcttactgttctctgcctcacacattaggttcaggcaatatcacacaaccagtaatctcacctgcctggaatggaaaccgctttttcttttctactcatctggctaacctcacttatcctttaagtcttacctcaggcattacttcctccaggagacctaccctatactccaatcctgtaacatgtcttgcacagctctgtttctgaattgtgatcatctgctaatgaatctgtcttccccattgaactcagggctccaaaaagtaagggaatctgtcttctttatctttgaatcatggagcatttagcacaatgtctgacacaaagtaacaactcagtaaaaactgggttgatgtaatgaaaaccttaaggactttccaatttggggatcctgtagttttgtcagattgtgcccaagtttattgaagatgcattttcagtgctaagtaataagtgattcttctcatcctgaaagatttaagcccatacccctagcctgcaggataacactattctactcccaaagaagattaagagcatttaagtaagacagaaacaacactgcaacctcatgcaacaattctcagggttcaccagtgaagacccagaactatgttccgtactgcaagccctgaaatgagaagtggacctgccaacccagaccggtcctggtaggacaagggcaagcaatggcctgcaggagatcccatccagaccacagctgtgcccttagccacagggagtaatgtttattgctgagaaaaaagcaagacctattattaatactaccgataatgataaactgtatttggttctcattttagattgtgagttctcgatctcagccaagtgctttgtcttctacatagccttgtgctagagaacacatatgttgtgtgttaacatgttccattctcttctgatttatttttaggaatagatcttacctccaaaagtcctttgtaaattttataatcaggaaggggagcacacagtcaatgaactgagaaccaaagtatctgcttaggcacaaaccagccgatttgctggtggttggtaaatgtcagggtgtgtgcaaaacacagtggactttgtaaatgtaacaagcaagaggacagtgttgcctatatgaagagacttcagttctaaaagtgaatgaatgccagaatagcttttaaataaacttatacagatttttttaaacttcatgcatatggctaccaaaaatttggcatttttgattcagacagatggtagtgctcattttaactttaccaaacaaacccttctactgcatacaaatgaacagcatgagcaagatttcaggaagggaacagcatagcgttgaggaatttgaaagccctgctccacctcagttctccttcctcttcctgatctttggatctggcattagccacagttgcaccccttttgcccccatctcttccctcagtgacttcacccaatctcactgcttcagtccttaaaagggatttatttgtgggtctgcatccttattcaaaactgagccccacagcacaactttcatatttgtgtctttctgcaggaatagccacgtggattagccttgctattacctgctgaaaaccaacaccttttttcctccaatttcctttcctattttctcattctttcttattcttgtccagggttctcctctcccctccaagtccccagggtctaagtcagcccctcctgctctgggttctccagtgatttctccattcctttgtgtctcacttgtggatattttggtctgccccctgcctagggtcccagcttctctccccttgagattactgccagattcgatttcaaggtatctctaaatgtatagaaactatgtaaccaaccttcatcaaatgccttcaatggcttcctacttaagaaaggtaaattcctcagccacccatgatctgagtccacctactgttccagtgaatttcttgactttcctacaaactctgcctcttagccactggagaccgtgcacattttctacttattgcctttgctcatggtgtctcctttgctcatctctctcatccatgagtacttctgtctagcctttaagccaggttaagtgtctccctctgtagagtgcctcgcctactcattccagtccagtggttcctgcagtcttatatccttttgagaattcagtgaaaactatggaatatgcaggcacacagacacacacacagacacacatgcacatacacacacatatatatccctgccatgagaaaaatgtgcacttgttcgcatgtataagattgacaggcaagttcaggtagtccaccttaaccctgggttaagaatgctggctcggtggctcacgcctgtaatccctgcactttgggaggccaaggcaggtggatcacctgaggtcaggagttcaagatcagcccagtcaacatggtgaaaccctgtctctactaaaaatacaaaaattagctgggcatggtggtgggcacctgtaataccagctacttgggaggctgagacaggagaattgcttgagtccgggaggcagcggttgcagtgagctaagattgtgccattgcactctagcctgagtgacaagagtgaaactccacctcaaaaaaaaaaaaaaaaagaacactagctgccagaaggagtccttccttcctctctactggtgcagccattggttgtatcactggaatgatcaccaggcttcatcacactaagcatatattcttctatgttcctgtctaggagtcactccttttttttttttttttgagacggagtctcgctctgttgcccaggctggagtgcagtggcgcgatctcagctcactgcaagctctgcctcccgggttcgtgccattctcctgtctcagcctcctgagtagctgggactacaggcacccgccaccacgcccggctaattttttgtatttttagtagagatggggtttcaccaggatggtctccatctcctgaccttgtgatctgcctgcctcggcctcccaaagtgctgggattacaggcgtgagccaccgcgcctggtggagtcactcttgattgctgaatgcataactctgtgtgtgtgtgtgtgtgtgtgtgtgtgtgtgtgtgtgtgtgtgtgtgtgtgtgatggtatgcatctagtctaaccccactagaccgtgagcatccaagggcagcactccagccttgcacaaattgtatcttcctagcaccaaacacaataacttgcatttgttacatctattgatgaacagatggatggacaaatgcttggagcactgtcaagtaatacagatttgatttatgtacactggttcttcatgatcacaaatactcttatttcatattaacttggacttctaaattactaaacactactttcaccattcttttgcatacttttgcaaaatatcatgaaattttaattccttccaacaaaatttaaaatccaatgttttatttatagtctttcctacgacaaatagatttgaatggatctgaccttactggaatttgactctgtgttttagaaaacaaacttaagtgggtttgttgttgttgttttgagacacagtcttactctgtcacccaggctggagtacagtggcacaatcttagctcaccacaacctccacctcctgggttcaagcaattctgttgcctcagcctcccaagtagctgggattacaggcatgtgccaccacacccggcccaaatttaattgttttaattttacatttcactattacacctacagcatgggctagaaaagaataatccccaaatttcagttatcatacaaaaccaaaaaagtacccacagagcttaatcattttgacatgtaccaacagtagccatacaactagcaattacattattttgtcatcttacctctatctccaaagggtaacagaatgattaaaaacttatcagatgaacatgagattgtatagtttaaaagtaagtaaaatactccttcaaaagcactgtttagggattactatatacccaagctttaccttcccaggactgttttttgttgtttttgttgctgttgctgttgctgttgttgttgttgaccgtggaactttttctatttttttgcatatgtaatatgcacagtgaagcatgctgaatagtgacaattgtgtcattttcataattatcagttttcaacattttactttgttcaagttgaccacttttctgtggaaatatctttatttgtttcaaagctaattttattcatttctgtctaatgctatatanggtaagtgggagaaactcattaacttgaagcatattgtttttcatctactgcaaataagcttatatacagtgctattagcacacagctttgaagtttgtctctgacttcagggtgttagcagtgttctcccgcagtcacccagagagaacttacagaaggggtaaagaacactgtaaaaggaaaacagttct

SEQ ID NO: 11 - DNA, 104550 bp, Homo sapiens
  modified_base (530)..(530): n is a or g
  modified_base (8888)..(8888): n is t or g
  modified_base (13969)..(13969): n is a or g
  modified_base (19424)..(19424): n is g or a
  modified_base (24336)..(24336): n is g or t
  modified_base (26316)..(26316): n is c or t
  modified_base (52242)..(52242): n is c or g
  modified_base (56838)..(56838): n is a or g
  modified_base (68100)..(68100): n is t or c
  modified_base (69398)..(69398): n is a or g
  modified_base (83374)..(83374): n is a or c
  modified_base (92350)..(92350): n is a or g
  modified_base (103191)..(103191): n is t or c
  modified_base (103872)..(103872): n is t or c
catccagtagctgcgctgtctctgctccctctaggaaaggccacctgcctgagctttgaaatggcccacaccgtaccagaaggaagaagagagattccaggaggattcagacgttacccaggctttctggaaactgagcagaaccacaggaggagaaagctataggcagctgaacaaaatttatgtgtttctatttcccctgctataacatgaaaggactgggctctgtctgtggttttcaaatctcctcctctcttaggggcttcaggcctcaccccaaatagggaaacttcacatacagcattctctcccctaatccctgttttttctattctttgctcttctcttatctacctccttcccctcccgtttcccttcttcctctgcccttagtcttttttctttttcttaatttccttttagtcattatcatcttcagttcacataggtagtaactattagggttagcagggcaagatcccatttggaaaaaggatttgattgctttgaaaatgatgttgggcaacccncaggatagatggtctccaaggtccctcccagattctcagactcaaggcaggccctggggtttgaacctatggccagtaggagctggatagcaggtgtctgcatggataatatgccatgatcaactgactaatgttagttgcaagcctgccttgctggtttaagcttcattctcattcttgtctttttttttttttttttttttgagacagagtctcactctgttgcccaggctggagtgcagtggcgcgatcttggctcactgcaacctctgcccccaggttcaagcagttctcctgtctcagcctcctgagtagctaggattacaggtgcctgccactgtacctggctaagtttttttttttttttgtagtttttagtagagatgggctttcaccctgttgcccaggctggtcttgaactcctgacctcgtgatccattcgcctcagcctcccagagtgctgggattacaggtgtgagccaccgcgcctgaccgtcatccttgtctttgaggtattatattttgcactttacacataagggaactgggtgtcaggtaactcgttcagggttcacagccagtaagtatattgcagaactgagatgtaaattgagatttatgcagaccccaaatcctgtgaccttttttcttttaactactataggcttttctctgttataccgagttacctagaaacgtacttcctacagcctgggttcctgaatggattagccctaaagtataaaatgattatgccattgcagacagacctgaagaagaggctagaaaggattagagttaaagtaactttgttttttgtttttgttttttctttatctccaaaggatctgtcatctagcaacttaatttttatcaggaagcagtattgatttcttcccattccttctagttacctctaccagtttcttgattttcattcatttaatattattaaacacgtaccggattatgtgctaggcagtaggaacaaagtagtgaacaaaagttgttcttactctttggtgtttacagtccaacagggcagtaataacatttactgagtatggtgaggtgtggagtgccactggatgatataagatattctgagtagtcatgaagggtttccgggaggaagtggtgtttaagctgggacctgaaggaagacttagagctagctgggtaaaaggtagggtagagtgctggaatgttttaggcactactttgtagagactgcattatagaaaatgaaaagtttatgattaagatctgggggcctttgtcatattactgcaaggatagaaagtgcagttaaagctttaggtatagttggaaccaggaactggaaaatagaccaacgtagctacctccctccctctttacagttacaaaagcttcttgtaccctacatctctcagcagctggattttcccccctcttttctcttttgtcacttccccatgcactcagcagaggagagctgaccctagctccctgaaggtatgtgtcttcaggttttttgatgaccagaggctgagaacactctgaatccaattccaagtggaacagaatgtgtaaaaacactgttagggagatcattctgcacagaacagctcactccacctggcctttccagcctgggagagtgtctgcctctggtctagtcagctgaggcccaaggtggggtcatttattaaataaagctgcatatctcggaatgtctaaagggcaaggtgggaattgtcaaaaggggtctcattgatttctgacttgttaggttaaagttcttggtactgttttccctgtcattctccagggagtgtgtatcactctccggtttttacagatgaggaaaatgaaacaaaagttgggtaacttgccagtcacaagtaaggggtcaaaggattgtcatgagtattaaataaaacagtatacttgaagtcctgagcacttggtacctagttaatgctctgttattcctttgaagtaaacagggttgacaagatgtgaatccccctttgtctcggtctctatgtaaagcagcatgtgcagaagtacaaatatttggcttggtggtcagatgactttacaatggtatggaagtgatacacatgcagtagaaaccttacttccgagtacccacgcaactgttctgtttttcattttcagtatagtatttcatacatcatatgagttactcaacacttttattataaaatgggctttgcgttagatgattttgcccaactgtaggctaatgtaagtgctctgaacatgtttaaggtaggctaagctaagctgtgatgtttggtaagttaggtgtattaaatgtattttcagctaggctgggtgcaggactcatgcctataatcccaggactttgggagaccgaggcatgaggattccttgagcttaggagtttgagaccaatctaggcaacatagtgaggccttttctgtactaaaggtactaaaaattaaaaaaaaaaaaaattagccaggtgtggtggtacgtgcctatagtcccagctacttgggagcctggggctgaggatcgcttgaacctgagtggtcaaggctacagtgagccgtcgtcgtgtcaccgcattcccgcctggcaacagagcaagaaactttcccaaaaaaaacaagcatttcaccttatgaggttttccatttatgaagggtttattgggatgtaagtccatagtaagtcaaggagcatctttatatagttagaatagggacagtcaagtgtttcatgcataatccaaatcttcaggaggcaacatcaaggtaacccgagtttagggatattctgcaaaataactggcctgtaaacctcaaaattaagtcaagatcatggaaccaagaaaacactgaggaattgttccacactaaagaagtgtgcagaaacatggcaactccatgtggttcatgattctgaatcggcatgattggcaaaactagaatgtctgaaaattagattgtagtcgtgtatctgtgttaatgattttatttttatcttcttttttttttaactcttcttttttttggtattttcttttttgttttggtttgtccttccttttttttgttgttttttgttttttgttacaaacccttgtgtcgatagctgactgctctgctgtatacgaaaccctgacccagaaacaggttgtctgtgaatggtttagcacaggtcccccgtgaatgtgcattgtgtgacgggcaaaagtgtggccgcctttctactgtgccaagttttccagcatgagaggctttccatatctggtcctcagatatgtggtgtgaatgaaggggggaccagctatccgaggccaaccgaggctccacagttggctgccatgtcattttgcctgggcgggattctgacttagaggcctttggtcataatctgacaggtgagcgttgacgattttgatggtagcattttgtttgtatgggagaatagtctagttttgtttgttggaaatagtcactaaagtattgggggataatgagaaagaaatactggcaaacttactctcacatgcttcagagactaaaagtttgataagctagatatagaacttttcctatggtttgagatatagttccttttctctaaagagttgtcggtgagtccctttcagaaacgtacttgagtgaggatgtgttgaaatttgtgggaagctgtgaaaggcagcttttagcctaccaaaagaggactggcctggaaggcaagagacctgagtcttggtccctgcttctgatgacatgtcacatgggcatgtgctcgtcactctgcttctgcaagtttttgtgtttctcatctgtggagttaagggattgggatggtctctagggtctcgtacagctctaatattgtcaccgccctcaggaacattacatgaaattagcatatatgcaatatattaagattcatgtgtggattgtttcccagttactagcgctgtctttaatgtaatttacctcagaaatctctggataatcattattgagatataatgaaatagggaaaaacttgaggttaaaaactagtaaattgatttacttcaacattaaaagcccacaattaaacccttgaggaaaatgactatttttattttttattttttgctctgcaagtaaggttggaacttcgtaatactgtatgacagtagtcgtttacctcacgaattagattattcatgtgtgtttgactgaagagagtttttacctagtgactggaatgaatgttaatgctgctattttggcattggaaaaaaaaggtgtaatgaaaaatgtcaagtttgagagagagagaaatacttaaatagaactgatttaaaagcaattctgaaaaagaaagaacttggcacaatctttctatgaaagcaaagactttactgcacagctaaagaaaatgaagcaaaaacaatacattgccccaattaatgtttgaattcactgaacacaaggtaggctagcaaagtagagagtaatatctttgcctcaccttggccacaaggatttattttgtcagtaaccaagtttagtgtactgctatttagctttttcactacagatgtgaaaatgtttctttttggggtttgtttgaaattttctttcccttttcaatttagcagtgctgaacctatcctcaaataaatttacatttttcccattaaatcaactttgtttctgttccatggttgaagcaaatactttataaagaaaaaaatcagtgtagacctttcacaagttaattattactgcagggctatataggcaaataaaaatattagatgttatgttttagaccagtgaaaaaacagttggtagtgatgctagattaagacttgccagaatgttcatccccttagtgagccattctgcttatgataacattttgtaatgttttcaggcattcttttgggacagccctgatcacttatcattcaaagggatgataaaagtgacaatctttagacgtgttgtaaattctttctttctttcgtccaaagggagctagaaagaaaagacatttgtgattatctgtccacttgaacacaactgctagaaagagctatttaattattgccaacaaggcagtgtgagagtttatagtaacattaggagtgtttccagttatcccagcaggattcagcattcaagaactggtaaattttggccagacgcggtggctcacacctgtaatcccagcactttgggaggccgaggcaggcggatcacctgaggtcaggagttcgagaccagcctgaccaacatggagaaaccccgtctctacaaaaaatacaaaattagctgggtgtggtggcacatgcctgtaatcccagctactcgggaggccgaggcaggagagtcgcttgaacctgggaggcggagcttgtggcgagccgagattgtgcgccattacactccagcctgagcaacaagagtgaaactctatctcaaaaaaaaaaatctggtaaatgtttgtctggcatcatagaatttaatgcttacctctaaaaatgtaaattggaaaatattttagccttatgtggtgtgtgatgttagcagggaagtctctaatgttttcacatgaagtcagatgctggctttggaccgaggtgtattttgtttacttaaggcagtatccatcatttcctattttagttttttgtttctttttgtttgtttgttttttgagatggagtcttgctctgtctctcaggctggagtgcagtggtgccatctcagctcactgcaacctccacctcctggtttcaagcaattctcctgcctcagcctcccaagtagctgggactacaagcgcgtattgccacccccaggtaattttttgtattttagtagagacagggtttcaccctgttgcccatgctggtcgtgaactcctgagctcaggcaatccacccgccttggcctcccaaagtgctgggattacaggcatgagccaccgcacccagctgtcagatgtctttactgcctccgtgaagatgatatgatttcatcacatttaacattgttaatgtgaagatcatgtcaatagatttccttatatggaatctctcatacctggaataaactgtgcttgtttatttgtattcctttttataatgtgccattggattctgtttgctaatattcagagattttgtgttgatattcgtaagtagtattcaactgtagtatcttttgtgcagtctttgtcaggttggggttaccattacacttgcttcataaaatgagtgtggaagttttctttccttttctgtgttctgaaatagcattaagactactttgtctttttttttttttttttgacacagagtcttgctctgtcacccaggctggaatgcagtggcatgatctcggctgactgcaacctcttcctcccaggttcaagtgattctcctgcctcagcctcccaagaagttgggactacaggtgcacaccaccacgtgtaactaatttttatatttttagtagagatggggtttcactatgttggccagactggtctcaaactcctgacctcaggtgatctacccacctcggcctcccaaagtgctgggattacaggcgccagccaccagtctaccttatcttaaaatggtataattttcctttgaaactatttgcctggtatttttttggttttcttagactggtttctgcttggtttctaccaccactcttaatcccctccagttgttctctgcaaccaccaccatgactgccatttccttgagcacttattatccattaagcacctttatgtgtggtaattaatgactgttatgtgttttgttgttttgatacaaagtctcactgtcgcccaggctggactgcagtggcgctgtcacttgaatccaacctccacctcccgggttcaagcagttctccagcctcagcctcccaagtagctgggattacaggtgtgcgctaccacatctggctaatttttgtatttttagtagagacagggtttcatcaccttggccagggtggtctctaactcctgacctcaagtgatccacccacctctacctcccaaaatcctgggattataggtgtgagccactgagcccagcctgttatgtatttttgtcttttgttttctttgagacagggtgtcactctctcactcaggcttgagtgcagtggcatgatcacggctcgatgtgtttattcttgtttttttcttgtttttctgttgtttttttttttgtttttttgagatgaagttttgctcttgttgcccaggctggagtgcaatggtgcaatcttgactcactgcaacctccacctcccagattcaagcgattctcctgcctcagcctcccaagtagctggaattacaggcatgtgccactacgcccaggtagttttgtatttttagtagagatggggtttctccatgttggtcaggctggtctcgaactcctgacctcaggtgatccgcccgcctcagcctcccaaagtgctgggattacaggcttgagccgccgcacccgggctggactattatctttctattaaacaatacagtacttagtatttcctggttttgaatttcatataagtgaaatcatactgtgtgtattcttcaactagcttttttcattcatcattatgtttttgagtatagtatagttacttgttttcactgctttatataccattgtataaatataccacaatttatccattctagtattaatggacattaggtttgttgttattacagtgttcctgcaagtaaccttgcacatttctcctgatacacaagagtttcacagatctttagacagattccccagtagtggaattgctggatggtagggcatatgtacattcaccgggtattccacattgttttcctaagttgttttcccagtaaagttttgtgttattattattgcacatcatgtgtttaattgattccttgatactttatgtttgttgttgctattctaagtgatatcttttttttttttttttttttttgagacagagtctcgctctgtggcccaggctggagtgcagtggcgatctcagctcattgcaagctccgcctcctgggttcacgccattctcctgcctcagcctccctagtagctgggattacaggcgcccaccaccatgcccggctatattctaagagatatctgtagatggtttatagaaatgcatttgacttttgtaaactgatgaattactggaataaaaagattgtccaacaaactcttattccagtaatccctctttaaattttttaaggacaaacatatcatctgaaaatcatgatattttgtttcttttcatgacntagatatattttatcttgtcttaactgtgctggccggactctccattacaaagttgaagagcagtggtgatacagagggcatccctgacttgttctgatgttaaaaggaaagcttttattgagtgataggggctactggtttttcataaggcttacttcccacccaccccctccccggaaacagggtcttgctatgttgctcagactggtctcaaactcctgggctcaagtgatcatcccactttaccctcctgaatggctgggattacaggcacatgccacagcacctggcttcataaagctttctttgtcaagtttttttaaacttaaagaaaaaaagaatcctgaatgattgaatttctacagatgctttttaattgcatgtatagaaattttcttgttttttttctttaagtttcatgttaccctaatagattttctaatattgaatcaattttgcattcctgggattaaacccaacttggtcatgatgtattattattatatattgctggatttggcttgttaataaataatagggtttttctcatgtggtttggtatgaaaattagactacccttacaaaatgaattggcaagtgtttcttttcctattcttctgtttttatttctgtaaaattagaatgattccttcaaagtttggtagaacttgcctgtacaagtctggacctgggtggttttttggttttggtatgtgtttggttttttgttgaaaacatgttaagctgattcaaaattattttaaaaatggttatacgactgttcctactttgaatttcttcttggtaattatatttctcttggcatttattcttctcacttatttttacatttactagagtattgtattttcttacctcttttaatcttattttgaatatccatttaaacataggtaagatataagtactgtttgtggctgggcacagtggctcatgcctgtaatcctagcactttggaaggccaaggcgggcagatcacttgaggtcaggagttcaagaccagcctggccaacatggcaaaatcttgtctctactaaaaatacaaaaattagctgggcgtggtggcgcctgcctgtaatcctagctactccagaggctgaggcatgagaatcacgtcaccccaggaggcagaggctgccgtgagctgagatcgcgccactgtgctctatcctgggcgacagagcaagactctgtctcaaaaaaaaaaaaaaaaaaggtactgtttacagaataagttaaatacttgtcatcactgtgcagattgcaaaatggaacattgctagtaccttagaaacgccttctcaaatctttaagagttgagtacgttccttaattttgtgataattgttcttttcagactcttctccctttttattctttacttttattgatgtataatatacataaagaaaagtggccagatgtggtggctcatgcctgtaatcccaacactttaggaagccaaggtgagaggatcactttgagctcaggagttcaagaccagcctgggctgattatagacgtgagccacattgtcctgctgggtatatatttagtagcagaatgactgtgtcagtctgtgcatagattccattttagtagatgtgccaaactgttttccaaagtggtaaaatatttccattagcagtgtattagagttcagaccagtgcatattctcaacaacacttggtatcatttttagcctctctagtgggtatgaagtggtatgcattgtgggttttgtttgcatttctctgatattttagctcttttttggtggttaactcttttttgtatgtttatgacattcggctatctcgtgaagtatttaagggttattttgcaaatttttctgtggagatttttgtttcattaaattataggagttctttgtagattttgatgagtctttttttagattcatgtgctgcagatattttctcctttccaagagttacctctttttttttttttttttttgatacagtcgcaatttgtcgcccaggctggagtgcaatggtgcaatctctgcttcctaggttcaagtgattctcctgcctcagcctcccaagtagctgggattacaggcacgccccaccacaccctaggctcactgcaacctctgcttcctaggttcaagtgattctcctgcctcagcctcccaagtagctgggattacaggcacgccccaccacgcccagctaatttttgtatttttagagacgggatttcaccatgttggctaggctggtctcgaactcctgacctcagcctcggcctcccaaagtgctgggattacaggcgtgagccactgcgcccggccgaattacagctattttaaagatcatcttcagtaactagtaactgggtcactgtggatatgtggatatgttgtctcttttttctcgtttctgtttccttgtatgcttggtaacgttcaagtgaatgctggatactgtgtatgaaaattgttgatgctctaggtgacatttttctccagagagagctctccctaatcactgataggcagatacagtggtgacagataaccataattcagtgagagattgagctgattcgagggttggttgcagttttttttttttttttgtattacacaccttttaatttgaattaattaggcatgatcattattgaaaattggtaaagtgtagattgataacaaccaaaacaggggaaaacattcatttaaaactttcccaaataaatgctccatgtataggcctctattaaaataataacaataaacattttttgaaccactttatatattttaagatttgtttagggctttttcatttgcacgtgaaaatattcctttttttttttttttttttttagtatttattgatcattcttgggtgtttctcggagagggggatttggcagggtcataggacaatagtggagggaaggtcagtagataaacatgtgaacaaaggtctctggttttcctaggcagaggaggaccctgcggccttcctcagtgttcgtgtccctgggtacttgagattagggagtggtgatgactcttaactagcatgctgccttcaagcatctgtttaacaaagcacatcttgtactgcccttaatccatttaaccctgagtggacacagcacatgtttcagagagcacggggttgggggtaaggtcatagatcaacagcatcccaaggcggaagaatttttcccagtacagaacaaaatggagtctcccatgtccacctccctccacacagacacagtaacaatctgatctctctcctctccccacatttcccccctctattcgacaaaaccgccattgtcatcatggcccgctctcaatgagctgccgggcacacctcccagacggggtggcggcccggcagaggggctcctcacttcccagacggggcggccgggcggaggcgccccccaccgacggggcagctgccgggcggggggtgccccccacctcctggacggggcggctggccgggcgggggctgccccccacctcccagacgggctggctgccgggcggagacgctcctcacttcccagacggggcggctgccgggcggaggggctccttacttctcagacggggcggctgggcagagacgctcctcacctcccagatggggtggcggccgggcagagacgctcctcagttcccagacggggtcgcggccgggtagaggcgctcctcacatcccagacggggcggcggggcagaggcgctccccacatcccagacgatgggcggctgggcagagacgctcctcacttcccagactgggcggccaggcagaggggctcttcacatcccagacaatgggcggccaggcagagacgctcctcacttcccagacggggtggcagccaggcagaggctgcaatctcggcactttaggaggccaaggcaggtggctgggaggtggaggttgtagcgagccaagatcacgccactgcactccagcctgggcaacattgagcactgagtgagcgagactccgtctgcaatcccggcacctcgggaagccgaggcaggcagatcactcgcggttaggagctggagaccagccgatccaacatggcgaaaccccgtctccaaaaaatacaaaaaccagtcaggcgtggcggcgcgcgcctgcaatcccaggcactcggcaggctgaggcaggagaaacaggcaggaaggttgcagcgagcggagatcacggcggtacggtccagcttcggcaacagagggagaccgtggaaagcgggagaaggagagagggagagggagaaggagagggagagggagtggtgtgtttggcgggggtggggggactctttgtgtggaaggtgacagacttgcacgtttgcttacatatactagagttagaactgtgcttgggtaggtactttgagatcattggaataaagatagcatgtgaaaacagaataattatgaaaacgtcttcttttatacagcactttgtactttttaaattgctttcactgctgtcacatcaaacctcttcacacttctgtaggacagataaagcacaattatttctctgttacgcagatggggaaacagacctaggcagggatatagtgacctgcccacaggtctaacagcatttgagtgataattagaactaaagtggaggaatttttatttgagaagttgagcagtgagagtcaaaatcttcttaggagctgtaggtttttgtaccaatggagagatctctttttctgttggatatgattgacaatgttagaagagatattcactggaggaaggccccgcagaaggaatgaggaacagacctctggcctgtattgtgcctccattgtctctggtgtagttgtgcatattgtgagattacagatgggaaagaaagagatcttcaccctcagctcaagagaagaaagtaagggtgctgtaggaacagatgtcacagtaaaagcatgccaatctaagtgtgctcaagggattttatgctagttggccttaggttctggtaagagataaggtggggcatctgccaagagtacatnagggatcaggggcttggaaagtgtgaagaaagtttgagatagctgttgtgtgcttaaaattaactaaagatgaataaaaagactggcccctttcattgagagtggggactttgttctctgctgtatccccagcacctagtatacacattgcacatagtaggtactcagtaaatatttgttgaatcaggcagattcctgcctaggtctgtttccccatctgcataacacaaataaggctggctaaccctgtgccatctccgtaatagtcttcatcttctcttcactttcccattcatttctctatattagttgaatacatgaatgaagacaggaataagttcctcactgaagttacaagcctttttaagaacagcaaggtaacatatctcatttatcaaattagtaactgcatttgaaaattcagctctgacacttatggctgggtgacttagagcatgtcctgtaacttctcagagtctcattttactctggtgaaacaaggatcatgtcttttgagtgttgaaatgactgtattaactaaatcactatgtaatcctaagagcaatctttatgcatcccagaatggggtagagaataaagtattggagtgaatgactgtgggatataggctagatacctatgtacatagataatttcatggagcctttttaaaaaattatggtaatatacacataacaaaatttaccatcttggccaggtgctcacgcctgtaatcccagcactttgggaggccgaggcgggcggatcacctgaggtcgggagttcgagaccagcctgaccaacatggagaaaccctgtccctactgaaaatacaaaattagccgggcgtggtggtgcatgcctgtaatcccagctactcaggaggctgagccaggagaatcacttgaacctggctggcagaggttgcggtgagccaagattgcaccattgcactccagcctgggtaacaagagcaaaactccatctcaaaaaaaaaaaaaaaattaccatcttaactatttttaggtgtactgttctgtagcattaagtagattcacattgtgcaaccaatttccagagctcttttttttttttttttttttgagacggagtcttgctctgtcgcccaggctggagtgccgtggtgcaatctcagcctcccaggtgcacgccattctcctgcctcagcctcctgagtagcggggactacaggcgcccgccaccacgcctggctaattttttgtgtttttagtagagacgggatttcaccctgttagctaggatggtctccatctgctggcctcgtgatccacccgccttggcctcccaaagtgctgggattacaggcgtgagccaccgtgcctggcctccagggctgtttacatcatgcaatgctgaaactctatagcaattaaataactctccatttttccttcttccaagcccctggcagccaccattctactttctgtctctatgaagtctgactgctctaggtacctcatgtaagtggaatcatacagtgtttgtctttttatgattggcttattttacttactataatggccttaaggctcatccatgttgtagcatgtgtcacaatttcctttttaaggtggaacaatatactccattgtaaatacacacaccactcatctgttgatgaacacttgggttgcttttgcctcttgtgaataaggctgctatgaatataagtgtacaactatctctttgggaccctgctttcgattcttttgggtaggaacccagaagggcactactggatcatatggtaattctgtgtttaattttgaggaaccacaaactcctgagttcaagtgatcctcacaactcagcctcccatactgtttccaaagtggctgcaccttttcacattcccaccaacagggcaaaaggattccagtttctccacaaccttgccaacacactgcccaggaggcagaggttgcagtgagctgagatcgcgccactgcactccagcctgggtgacagagtgagactccatctgagaaaaaaagaaaaaaaaaaaaaagacctgatttggctatgggggttctgccctcatgaatggatttaggtcattatcacagagtgggttggtctaaaagtgagttgggccctctctgtctcttacgctcctgcctttgcttgcccttctgccatggggtgatacagcaagaaggcctctgccagatgcaggcctcttgaccttggacttcccagcttacggaactataagaaatacatttcttttcctataaattacccagtctgtggtattctgttatggcaacacaaaacagacgaagggattttaatgggatggttggaaactgaatgtggactacctagagtggacaccaccttgttggttgtagcaaagccatgttaaaaggtaagcctattgctacaatgtaagggtaggtaatattttatttacatactgtatcataagtatcaacattataaaggggataagtacactggagcttaatgttgtgttcctgtcttctataaccatttgatcactatgtctattcctaataaatctcacctgttctttaaaaatatcctagtaattctttgggttttgaatctttactctccattataagtatgtatacatctaaattttaaaaatatgcatgcaggcattctgactagatctccaaggcttggccgacctgttaaatgacataactcaagtaaattatcagacatatcagaagtacaaacttgatgggcttggttgagatatagtgatcctcagagtgctgtctggtgacccctgcactctcctctctgacaggagagctcagccttaccctttgctgaagaagtgagttctctttaccccttcttctgcctctgatgtcttctcatctctaaatatggtctgtacccctcacaccacaaataaaagtgttcttacttcagcaaaactatagggaggggctcgtcgccactggaattggttctaacggttgaaactcattcctcattcaggatccttccacaggtccacagtgctttatttgcagctcagggtttcagacctttctgggtatcttttgtaagctcatttggggcaaaacctgacgtggactgccacgagactattcatagtctgtatttttcccatctagtgtgattatttgtatgtttgctgcagaaatatcagtgctggattccttggtacacaccagacctcgccagggatgtatgcacatatgtatgcactgtattacctttctaaaatctgaaaaatactgaattctgaaacagctttgttccaagggctaatgaatctgtgcttctcctgaacttgctacaatttgtaatccccaaataatatagtttgataatcatctcagttttttttctttagagaaaatttggaaaacacagaaaggcacatttatgcaaaaagcattcacctgtaatgctgctacccagggatatctgctgtcaacatcctggcacatttttttcctagtaaaattgggattacattttatatacatcatatcatttggtattctgaatctttgatccaacacagtagtataatcattttccagaccactaatcagtctttgaaaacagtaaaaattttattttatttttttgagacagggtcttactctgtcacccaggctggagtacagtggcgcgatcttggctcactgcaacctctgcctcacaggttcaagtgattctcccacctcagcctccttagtagctgggactacagacgtgtgccacagccagctaatttttgtaatttttgtagagacgaggtttcaccatgttgcccaggctgctctgatactcctggactcaagcgatccacccacctcggtctcccaaagtgctgggattataggcatgagccaccacacctggccaacagtcaaaattttaaaaccggctgggcgcagtggctcacgcctatcattctagcactttgggaggccgaggcaggtggatcacgaggtcaagagattgagaccatcctggccaacatggtgaaaccccatctctactaaaaatacaaaaattagctgggcgtggcggcacatgcctgtagtcccagctactcaggaggctgagggaggagaattgcttgaaccctggaggcggaggttgcagtgagctgagatcgcaccattgcacgccagcctgggcaacagagcaagactccatctcaaaaaaaaaaattttaaaccatatcattattcatgcatttttttttacttgttagcaatatatttaaatactaaaaagggcttaacttttttaaaataaattttttattttatttaaaaattttattttagagacagggtgttactctgtcgcccagggtggagtatagtggcataatcatagctcactgcagcctcaagctcctatgttcaagtgatcttcttgcctcagtctcccaagtagcagggattacaggcacagtccaccatgcccagctttgcttaatgttcttcgcatgattaaagtggggttgtgggtttggaggggaggaagaccacaaagatagtgccattctcatcacatcacatcaagggcatatactgtcaacagaacactcttgttgttgaccttgatcacctggctaaagtgtttgccaggtgtctcactgttttctcctttttgcgtaatatactcaatggaagcaagtcattaagtgtatcccacactgaaggagtagggagttatcttccacctccttgatggtgtagtatcaacataaattatttggtattcttctatttgggagattgtctcttctccccatttgtatatatcactatggacttgtgaatattaattttacattttgggttacaatcccaatggcacttcgattttggtgcttatgtttttccagctttgggcattgggagctctttcagttggcttctgtgtccctttgacataccttaattatttacatgtaaaaaaatgtttagctccatacttcctggcactacaatatgttctaagttcatctagtatatttcttgccccagggacttaacttcaaaagaaccaaggctttattgagatataatttatggctgggcacggtggctcaagcctgtaatcccagcactttgggaggctgaggcaggcggatcacgaggtcaagagttcaagaccagtctggccaacatagtgaaaccccgtctctactgaaaatacaaaaaaaaaattagccgggcatggtggtgtgtgcctgtaatcccagctactcgggaggctgaggcaggagaattgcgtgaacccaggaggcagaggctgcagtgagccaagatcgcgccactgcactccagcctgggtgacagaaagagactctgtctcaaaaaaaaaaaaaagagagagagagataatttacaaacatttcacccgtttaaantgtacaattcagcgtgtttttttgttttgttttgttttttcttgagatggagtctcactttttcgccaggctggagtgcagtggcgtgatctcagctcaccacagcctcagcctcccgggttcaagcaattctcctgcctcagcctcctgagtagctgggatcacagactcccgccaccacacccagctaattcttgtgtttttagtagagacagggtctcaccatgttggccaggatggtctcgatcttgacctcgtgatctgcccaccttggcctcccagggtagctttttaaaatatatacacagatatgtttaataaccatcaaagtcaatttttagaataatcacctcaacaagaaacccttgactggatacagtggctcacacctgtaatttcagcactttggtaggtataggcaggagtatcacttgagcctaggagtttgagaccagcctgggtaaaatagtgaaaccttgtttctacaaaaaatttaaaagttagccaggaattgtggcatggccctgaggttccagctacttgggagggtgaggcaggagaattgcttgagcctaggtcaaggctatagtaacctgtgaccacgcgactgcactctatcctggccaacaaagcgagaccctgtgtcaaaaaagaaagaaagaaaccaatcctgtatcctttagctatttactctctctctctctctccccttctttttcagtgtaaagtaactaccaatctaatttctatctgtatagatttgcctatctggacattttgtataaatggcatcacatgtgtggcttctttcacttagcatgtttcaaggttcatccatgttgtagcatttatcagtacttcattccatttttatggctgaataatattccattgtgtggatacaccaccttttgcttgtctatcagttgatggagctttggtttgtttccaccttttgattattatgaataatgctgctacgaacatttgtgtacaagtttctatgtggtcatggttttcatttgccaggtcatatggtaattctgtgtttaaccacttgaacataaattgaagtattgatcttttaattatgttttgttagagacagggtctcactctgtcatccaggctgcagtgcagtggtgtgatcacggctcgttgcagccttgaactcctgggctcaagcagtcctcctgcattagcctcccaagtagctgggatcacaggcatgcaccaccatatctggctaatttttaattttttgtagagacagggacttgccatgttgcccacactggtctcaaattcctgggctcaagcagtcctcccatctcagtctctcaaagtgctaggattacaggcatgagccaccatgcctggcctattattgagtttttttgtttgttttgtttttgtttttgagacacactctcactctgttgcccaggctggagtgcagtggtgcgatctcagctcaccgcaacctctgcttcccaggttcaggcgattatcctgcctcagcctcgcgagtagccgtgattacaggcacccaccaccacgcccagctaatttttgtatttttagtagagatgaggtttcaccacgttggccaggctggtctcaaactcctgacttcaggtgatcctcccacttcagcctcacaaagtgctgagattacaggcatgagccaccacacccagctcctgtgattgagttttaaaagttctttatacattctagatacagattccttatcaaatacatgatatgcaaatatttttctctcattctgtgagttgtcttttcattttctttctagtgtcctttgaagcacaaagttgttaaattttggtcaagtccaatttatctatttttttcttttgttgtttatgcctgtcatgtcatatatgtaagaatccattgccagattttcagggtttaccctgaagatttatccctatgtttctttgtagagttttattgttctagctcttacatttaagtgtttgagccattgtatattgtgaagtgtaaggatccagctttattcatttgcacatggctgtctagttgtaccagcatcatttgttgaagggaaaggatagtcttttcctttccccactgagtggtgttggcacccttgtcaaaaatcagttgaccatagatgggtttatttctagattttcatttctgtcccatcaatctatatcttttttctttgtgccagcaccacccttttgattatttaccttgcaataagttttggaatttgagatgatatgggcttaacttttaaatgacttcccaagtaactaagggcttatacaggatttgcttttttagtttagttattatttttatttaaaatcatattctaagttttctgaagttacactagcattttaaaaaattaattattttatttttttgagaccgagtcttgctctgtcgcccgggctggagtgcagtggtgcgatctcagctcactgcaacctccgcctcccgggttcaagcaattctgtctccgcctcccaagtagctggaattacaggcatgaaccaccacggcctggctaatttttgtatttttagtagagatggggtttcacgatgttggccaggctggtcttgaactcctcacctcaggtgatccaccccgcctcagcctcccaaagtgctgggattacaggtgtgagtcaccactcctggccgtactagctagttttatagtgaaagattttattttaatgctgtatttttttttaccagcatctctccaatctcccatgaaagatttttaaaatcaacaaaaacaagccttctgctgtacaacacttactgaaaacatcactttcgttactctatccagtacttttaaattgatatatagtcctaaatttaatttcctgggcactgccccagagtctgtgagacaagtgccatttgttctctccccttcatagtcaggctctctcgggaatggttcgtgctgcttgctctgctttctgtgcccacctcttctgcccacgagagccagactttagccccctacccccactcttgcactctgaactgatggtgtgcacactctatgtacagtctttcttgattttgatctttctggactggttgctttttcctgaaggccttcctcaccaaagattctttttcccctttttttgccattctccctggaaaatcaaaagattttgattttttctggagcacttgatgttataagccatttcctttttaaaaagttacatctactactttgctgagacacctctggttttcccaagtctttgactctttgttcttagttcttgggccctctgtgtcccatacacactctctggatgatctcatccaaattcctaggggctgatcactcttctgtcctaaaaataaaacaaagccaaaacttctgcttccctttgaagcactaccatccttctttcctccagagccctgcccactgttttactttctccctcccacttcaggctaaagctcactttgctctgccagacctgttctcagcaaggattcttttgtttttttaaacctacgtaatgattatcccatactattgtgtcctattttttcctttttctatgtatctgactccaacatgtaacatcaacataatgttaaattttattaaaaacaggttatttatataactgttgcccccatttgttgggcatttatattgcttcattttttcagtttttaaaaatttttaaattttttattttattttcaagagacagggtctcactatgttgccaaggctggtctcgaactcctggactcaagcgatcctcccaccttggcctcccagagtgctgggattgcaggcgtgagctaccacacctggccctcattttagttttaatttatttttaactttttagagacagcctcactttgttgcccaggctagagtgcaatggcatgatcatggctcactgcagcctcgatctcctgggctcaggtgattctaccacctcagccccccaagtggctgggaccacaggcgcacaccatcaccccagataatttttttttttgagacggagtctcgctctgtcgtccaggcaggagtgcagtggcgcgatctcggcgcactgcaacctcttgcctcctggattcaagcgattctcctgcctcagcctcctgagtagctgggattacggacgcgtgccaccacacccggctacagataatttttttgtattttttgtagacactgggtttctccatattgcccagggctgatctcgaacttctgggctcaagggatccacagcgtcagcttcccaaagtgctgggattacaggcatgagccaccacgtccacccctacattttttttctccccccagatgtatacttttaagttctgtttttgtttttgtttgtttgtttgtttgagtctcactctgtcgcccaggctggagtgtggtggcacaatcttggctcactgcaacctccgcctcctgggttcaagtgattatcctgcctcagcctcccaggtagctgggactacaggcatgtaccaccacacctggctaatttttgtatttttagtagagactgggtttttctgtgttggccagcctggtctcgaactcctgacctcaagtgatctgcctgcctcagcctcccaaagtgctgggattacaggtacaaattgctacacccggcctgtatacttttaaattctttagtgtagggcctctgtcttgagtgcttatcagcttttcgctggtgaagtgggttggccaggataaaaagtatcatcaagatgccatttctctcttcttccccatcccaactcccagagctgatctgtctccctgctccaggctttcatgccctgttttgattactgtcagctttccagantgaagggatctctcttttaagtgttagctcctgaaataatgatctgagaaaagggatttttgtttgaagggaccatgctttttttttttttttttttggacataatttacctaccagagaaaagaaaaacttcacctttaaaaagaatataatttagttgttttcagtatatattcacaaagttttggaaccaccaccactgtctaatcccagaacattttattacctcaaaaagcaaccccattcccatgagcagtcactctccatttcttccctcccccagcgtgtagcagccagcctctgtgtcctttaacaatgtagaaccagccctacttgactctgagtgtgcaggtattcttttgcactcttgtttgcttacatttctgcatgcattttactattttgtatcaggatttatttatttatgtattactgtttggcattgatttcataacatcaatttcgagagtaatcattgttgatttttatttttttggctgggtccgggtatgtgtcttctcattctcttcctgcatcctagatctttctttttacttcttcctgctatttatttctttagttagttttagagacagggtctctgttgcacaggctagactgcagtgatcatagctgggtgattctgggtcccttcctccctcagttcagcctctcgagtagctgggactacaggcaggagccatcacacccagctaatttttaaaatgtttcgtgttgatggagactgctttctgtgttgcccaggctggtctgaaactggtaggggcaagccatccatctgcgtcagcttccccaaatgctgggattacaggtgcgagccatcatgcctgacttcttgtgggtttttgattctgtgaagccatctccttttctcttgagccttgatggtttgtacttaacactctcagctccttcctgggctgccctttaaaatttgcttgctgtgttccttgcagttgagtcttatctttgttctttgtttataatgtgtttattttcttgggttttgaaggcagcattctgtaccatttctcagcttagctcttcccagagttctgttgtgtaggattttctgggcacattcttgtataatggaaagaacatagaattcagaagaatgaataagggttaatcctagctctgtttttgggtgactggctaagtcacctcgactctatggtaggacttttaactattttaaagtcctatgtagttatcatgttctaaaaattagcatgcagatagatagatagatagatagatagatagatagatagatagagttttttgttttttgtttttgttgttgttttgttttgagacagagtctcgctctgtcgcccaggctggagtgcagtagcgcgatcttggctcactgcagcctctgcctccctggttcaagtgattctcctgcctcagcctcccaagtaactgggattaaaggcatgcagcaccatgcctggctaattttgtatttttagtagaggtggggttttgccatgttggtcaggcgggtctcgaactcctgacctcaggtgatccacccgcctcggcctcccaaagtgctgggattacaggtgtgagccaccgcacccagcttcataatttttatgcctaatgaaatataaggaaaactgggcaggcctggtggctcacgcctgtaatcccagcattttgggaggccaaagcaggtggatcacctgaggacaggggttcgagaccagcctgaccactctgtcgctactgaaaaatataaaaattagctgagtgtggtggcgggcacctgtaatcccagctactcaggaggctgaggggggaaaatcacttgaacccgggaggcagaggttgcagttagccaagattgcaccactgcactctagccaaggcgagattctgtctccaaaaaaaaaaaggaaaagaaatataaggaaaactaatgcagagtttacagttatcaanaaaaagaataagaatgataatgattattaaatttaattatttaagggccaggtgcggtggctcacacctgtaatcccagcactttgggtggccaaggcaggcagatcacttgaggcgaggagttccagaccagcctgcccaacatggtgaaaccctgtctctactaaaaatacaaaaaaattgcggggtgcctgtaatcccagctacttgggtggctgagacaggagaattgcttgaacctgggaggcggaggttgcagtgacccgaggttgcgccactgcattccagcctgggtgacagagcaggactccatctcaaaaaaaaaggtaattatttaaaattatattaaaataatgaaaaaagtgagattggagatgaaagtgataaaaatctagatggcagtgacactgtttgtattgaatttatgaaacaagttcacgtacctgttcatccaagtaaccttatatgtgagataagtattctttacattttacagaggaagatactgaggttcagtgaggttaagataattgcccgaggttacaagcacagagctgtgatacaatacaagaacttgaattcaggtttcaggacttccaagaccaaggctttgtatcttgacccaaaataaaagttgaatagtttgaaggttatttcttcaaatatactctatcacttaagtaggttttcgggagtgagcgaagacggcacaagtttgaacattcgtcctggagatcatctgttactctgaatgtatcgtgggttagtgttgtgggcatggctgctatctgggggcaggttgaaaagctgccacattgccactgtcatcctacggaatactagttaagcagaattatgagttcttgtgaaattactcaaattttttatttctcaagttacagtggaaatcttatttctgaaatttcttttcttttcttcccatattgtctcctcatttgcactcttgagcagtaaatacatctgttccaaacacaagcaaagacctagacagagaaataactgccagagtcagtggcagtgttgcagcttttcaacctgcccccagataacagccacgcccacaacactcacccactgcatattcagagtaacagatgatctgcaggacgactgctgaaactcctgctgccttcactcactccagaaaacctactgaagacctgaggaatggaggactagattgaagaattgggaagtcactgagaaccaaggcagtgcctctgtcattctctgtggagcagcaggccttgtttctgcagtccagatctgtctactacttggctcctctctgcagaatgaagtctgggtgcatgtggcccatcccagcattcccagttatgcaaccagatactcttctgccagccagcctggccccttggagtctctgtgctccagctccaggctgtctgagaagaggagctagttggcccagctctaccttagaatggattcttgtctgggctgggtagtacctcatcagctgtggccaggagcaatactctcaacagcacagacaaaaggggacagatccctattgggtaaaggtgatgtgggctggggtaagtaccctgagaggtgtctgtcacagaaaactgcctgagagaactttgtcaaagttctgggctccactctccaggggttttgttcagtcaataggtataaaatagaaactaagtgtccacttgtttaaaaagctccctggatgagtctgatgcctcttcagatttagaaatcactttactctaatacgtgtaaataaattaatatgtatttgtgtttgcatgaggaaataatggaaagataagcaactaataaaaatgggtaatgggtggagattgatgaggctgttgaggatgagggagcaggttctttcacacacacacacacacacacacacacacacacattttaaccaacttaaaaatttaaagaaacacttcagcttaacaattagaaatcagattcaaaacaatgattttaaaattgaagatactgaggtccagaaggtgcactgtatctgggaccaggtttctcatctgtgaagtaattccagtttttggtatcagtcacttaaatgtaatttattttttctcatcagcataatcccatagaagttcatactggtaggcaggagaagaagggaatagatcccaaagggaattggaagaatttgggttctattgctttgtctttgttctgtagagaaggtacttccacagtagacccaaaaccatgagatatgggcccaggacaaagtgagctgagaagaaaagggttggtgcagtgactctccatcttagttgaactttagaatcacctggggtcctttacaaaataaaatcccaattcatacacacatatacacacagtctaggacagttattcttagggttttttttgttgtttcgagacagggtcttcctcaaactcctgggctaaagcagtcctcctgccttagcctcccaaatagctgggattacaggtgtgagccactgcatttggctcgtctgatttttttgtttttgtttgtttgtttgtttgcttgagatggagttttgcccctgttgcccatgctggagtgcagtggcgcaatcttggctcactgcaacctctgtctcccaggttcaagcgattctcctgcctcagcctcccaaataactgggattacaggcgcttgccatcgtgcccagctagttttttgtatttttaatagagatggggtttcatcatgttggccaggctggtctcctgacctcaggtgatccatccgcctcagcctcccaaagcactgggattacaggcgtgagccgctgcacctggacttgtctgagttttttcatgattagaatgagattatgcatttttaagtgtgttgtgctcttctcagcacatcatatctgagaattcatgatgttgctgtgtcttagatgttaatcatttggttaaggtggtggtatctgcctgtttatccttttacgactattatcgtagacatcttaggggatgtactctgagactgtgatcaattttactcactgattttagcatccatccatgggtcttgtctgaaacttattattgtggtttttgcctaattctgatttttttccccaatttccttcattccttctgtattaattggagtgcatctgtaaggaagaactatcctccctctcatttattcacttatttatataggtgtggatgcatggatatgtgttttattctatggatttagtctaatactgtgatttattttgttgctcagattgttacaatttcaactttagtttgctctttcaggttggcctctaggccctttcaatatgcttttgtattttttttttttttttttgaaatggagtttcgctcttgttgcccaggctggagtgcaatggtgcaatcttggctcactggaacctccacctcccgggttcaagtgattcttgaacctcagcctcctgagtagctaggattacagatgcccgccaccacgcctggctaatttttttatttagtaaaggaatttatttagtaaaagaggagtttcaccatgttggccaggctgttctcaaactcctgacctcaaatgatccacccacctcggcctcccaaagtgggattacagcctggctgtcaatatgcttttaagtgtgctcattgctactgggtgtcactgcttctaagtcttctcagcagacagaactaggaaaataggcttatgtatactcagctacatattacacatgtatctatgtttatttctgtgtatgtctgtgtatatgttagaaattatgagttcatactgatatctcattctaatccaacactgtgtggtttattttagccttccctcttatttgtaattattttgccaacctggctgtcattatccttcatttttttaaacttactttttcagtcagtaccactgtctacatgaattagtgtcagaattgctaactcacatctttgtgagaaacaaatttacttactaggtagcagcatttgtgttacagttctttatgcctttagctttacaatatccagtcaaaataggttttcaaagtttcttcctcatgcccttcagtgtggttatgttattcctttgtaacgcagttagattcacttgttactgtttgtattctgggttctttaatttttttggtatgcgctacattactctggttttgagtcatctatacacaaagatatactcagagaaatatcactccttccttatccctaccatccattcccatttcgttttatccctttcccacctatcccctgtaggtagctgatctctttagtttctggtttatccttcctgtatttcttttgtacaaataagcagatatatgtatatgttcttattgcccatttcttatatgaaggatagcatagtctaaatcttgtactttggttttttcacttaacaatatatcttggaattcattctgtgtctgttcttagacatcttagaatgattttcattcatttttactgctgcatagtactccatgtggatataacatagtgtcttcagtctcctccaatgtgtgggcatttagattgtttccagtattttgcaattacaaatagtgctactgtggataatcttgtacatatgttttttcatatcattggaggtgtaccttcagagtagattcttagaagtaggattgctgggttaaaagatgtacacatatataattttgttaggtattgcccagttcccctccagaagagttgtacagtttgcattcccaccagccatatatgaaaactacctgcatatgttttaaaacacatacagatgaatgattatcagttttgtttagggtcttcctttccttctgcaattcctcttctatcatgacaggttgcaaaagaaactaactgcaactttttcatgaaaagaagtaaaattagttttccagagctgactgaagattttcttactggcattttaaagttataattatgtattacatttttccactttacctagtttagcatctgttatgtaacatctcaccacctgcttagttgtgcaggcagttcttttcagtttagataataatactggatactgcaagtttaaacattttccccatcttagtcattttccagatttctgagacaggtgtttaatatttccaaaagtgaggcagttcagaaaatatttgcatttcttcactcttacatttcagtgacggaggtggtcatctgagcctctcttcctttgacttgactcgttggggtacagcttacaaaagcatgccagggtcaccatgacaaagtagatcatcctcttttctagaccatggctccctatcctgccctctctccctgacgacccctggcttgagaccctcacctttgtgttttcccggtgtgctggtcctctctggcctcgctctggattctgtctgctgacctccccactctgaccagattctcagttctcctgatctctccactcccactctataggaaccctactgtttattttgtctgatcttgctcagactgctgatacatactggagaaagtcacttaattgtcatgattggcagcactaaacatctctggattctttctgctgagtcttcaatgttttcttttaacttgtccccgttcgggtccctttctcaccttccctgtgcctggtttgccttcacatcttctgccttccagcctgctctcccatactcccacacctcatttacagcacatactcaccttatttcaggaaagacaggttttgacttatcctgaggaaatagatctaaatagccagaaccttccaaatggataggctactttgggaagcagtacattttctatatcatgatcattatgattatttttcttgtccttactgcctgccttcttcagcttcttttcagttgacctgtctgaatctggctcaatgatgaacctgaacttggttgatcaccacaagagcctgtggccaaggactgttggcctatataaagtgtcatggttcagaacatgggttttgggggtcagcacacctggatttgaatctcagttctgttaactactaggtatgtaatcatggacacgttagttgaccctccactctgcctcagtttcttcatctataaagtaggggttatgtttcatagggttgtggtgaagataatatataaggatttttcttaagttcttagcactgtgctagtgactatgatcattatgattaaatgtagtccttccttattttctcactctacctcaggggtcacttaatgctcttggtttgtgttgatactacttctagctgttgtcataactcactgccagctagcctcacccagaccattgtaaagttcttttccagtgaaagtgggaggaaataaatgaggagaaaggaaatgtagggaaatgatcaagaagtggatactccatctatttcatcagggtctccctttctttctcatggcaagttcagaacacttctaagcagtaactgctttgcattagatagtatctgttaccaagtctcactttgggctaccctagcatgctttaagtaaaacagagctgcttggttatggatttttaagatgatggatagtcgcagtactaaatcctggtagtatatcttagatcaagtaaaatagacatttttcccattcatgaagagagaaatgtttttcatactttaataatttgggtaccacagttcaccaaaaatttgtggaaacttttctgaatataagtcactacaagtcttcatctatgtcagtgtctgcgcatacacctgtataactgagtgtgtctctttatccatattttttattttgtgctgcttatgtttggatgtagcctgaacatgaaataatggaatcttctttttgtaacttggccagcattatcaaagcatatatgtagggcatagctgagttaggactaaaactcagacctcctgatttgaagcccagtgttcttttctgatgttacttcctttttagggtatcacatgataaatgtaatgaataataataagtaaaataattttttttttttttgagacggagtctcgctctgtcgcccaggctggagttcagtagcgtaatctcagctcactgcaacctccacctcccgggttcatgccattctcctgcctcagcctcccaaatagctgggaccacaggcgcctgccaccatgcccagctaattttttgtatttttagtagagacggggcttcaccgtgtcagccaggatggtctcgatctcctgacctcgtgatcctcctgcctcggcctcctaaagtgctggtattacaggcgtgagccaccgcgcccggccaagtaaaataatttttaaaagaccatacaacttttttttgaaggcctactatcttttaggctgcatctgctttttctaatcttcacaatccccgggctttcctcattttctagccaagcaagtgattactcagagatactaagtaattcagccagtgtctctcagctagtgagggataggaccagaattgaaaccttttctgggtcttttagtctgttttattactgaagaaattgacaaatgcatatgtaaccaacaaaacttgttcaagctctgggctctccagagcaccttttctagagaagttgcatacttgttaatgactagattttaagccatggtacctatagtacattggaacattggctcttaaaataataaaaaattatgaataaatgctaagcatttgctattactggttttattgcttaaataaccttaggctagcttttaatagttcacttaatggtttgcagcatctgaaaaaaaaaaacctttgcactgtttttcttggttagtgaattgtcagagaaccaagctaaagtaaggaatacattttcttttaaagcaatcattagtattatctacctatttatttttggaacatgagtttggctcagtctaacttacttagcatctgaagacaagataatttttatctgtgaaacagagtgctgtagtttcgtgttcagataattaaagttcaccaaaatgggtggcttagagaacagcttaatagctttccctaaaaataacccattcacagttgttaggtagcattttagttgctacagtatatggtgcttgtgcatgataataacgtttgtctaaataaggtggatatattatccacaaatattgagcctctgctatgagacatgactataatgacaggggatgaagaggatgggaagaaaacctaaaaatattagaaattttatgtcaaagcctttgaaatgattgtggaaggctgggcatttattctaatgatactgtcattacttaaaacctgtttggaacatttcccttggaatttccttgaatatgagcttatgaaccatgaaagagaatcaaccccttaattttgtagcacagctaaatttttaaaaaatcaccttttgagatataatttatatgcaataaaatgtatctttttatgtgtactgttcagtgaaatcttgacaaatgtatgtagttgtgtaactgccaccacaataaagatacagaatatttacatcacttcaaaaagctttcttgggtacctttgcagtcagtttgtgcctcaggcaagcacggctttctttccttttgtttttgagacagagtccagctctgtcacccaggctggagtgcaatggcgcgatctcggctcattgcaacctcctgtctctcaggttcaaccgattctcctgcctcagcctcctgactagctgggattacaggtgcacaccaccacgcccagctaatttttgtatttttactagagatggggtttcaccttgttggccaagctggtctcaaactcctgacctcgtcatccacccacctcagcctcccaaagtcataggattacaggtgtgagccactgcacccagccacggcttcctatcactatagattagcttcagcttttctagaatctcatataaatgggatttaaaagtttgttctctttgtgtttggcttctttcatttagcatagtgtttttcagatttgtccttgttgcatggattagtagtaattccttttattgctgagtactgtcctgttgtatggatgtaccacagtttgtttaccctttgcttgttaattaacatttgggtcgtacacagtttagggctgttaggaataaagctcctacagacatctgtatatgagagtttcaactttgctgcatcctcaccaacacttggtattggtcagttattttagctattctaatgggtatttggttttaatttacatttcctttatgactcatcagtcatattttcatatttgttgtcacaaaggaagtgtttattcttttgcctatttgtaatattgggttgtttgtagtcttgttttgaagttttaagagttctttatgtatgctaaatacaagtcctacatattgcaaattttttctcctctctgcacaattcatttttgaccttgatgatcttatctggcctgctctgctcaccatctcattcgtggatcccactcagcagcctttccctttcagtcttggctgtctctttccatttccactgtcactgctcttacgcattccaaggactttactactcccttcagagatgtggtgggtgttttttttttttttttaaattattattttactgacttgagagtgctgctggattgatagtgaccttgggtctgggttgctagatgtcctgcagtgggtggtatggtttcacactgaacactgaactgacctgcttaacatgccaattacatccttgttgcttagtccacgccactgtcagtcacctcttgctggtattatggcagtgcttggaacggtttcctttttttttttttttaactttttcctttttttatttttattttctttttttaaaatagagacaggatctcactatgttacccaacctgatctcgaacttctgggttcaagcagtccacctgccttggcctcctaaagcactgggattacaggcatgagccactgcccccagccactttttcctttttacagttcagtttttctcttatttggtaagatcatttacaaaatataagttggatacttttattccccagtttaaagtgaaaggacacttaaaagataaatccttagcataactgctgggtcactgcgcatttcttctgcctcatcgtgagccacgctctctctggtacactgtagccacagtggtcttcttagggcttctggtctacttctggtctacttctggtctaccctctccctgcttgtagaatacttgctgcctttgccacccagcaacctggctaattccggcttatccttcagttctctgtttaaatgccttccctaatttctttagagaagaagagtcttccgtaagcttctaatttaaactaagttttctagttatccttaataacattaattatataacttgcattttccttagcaattatcataatttataatgtagtcatgtttatgacaaatatgtttattaatacctatgtctctctctcttattttttttttgtgatggagtctccctctgtcacccaggctggagtgcagtggcgcgatctcagctcactgcaacctctgcctcccgggttcaagcgattctcctgtctcagcctcccgagtagctgggactacagatggcacggcaccacgcccaactaatttttgtattttcagtagagatggagtttcaccatattgatcaggcaggtctcaaactcctgacctcaggtgatccacccgccgcagcctcccaaagtgctgggattacaggcatgagccactgcacccagcctctatgtctatctcctctcatagtttatgagggcagagagctttatatttttactgctttatccacagtgcttaacataatgtaggtgattatttgataaataaaattaactttaacattcaaatgtttttaaagttatttgatgcacatcctttacgatcccaaactgacgttttttttctcttgaatacaaacttctgtactagtttcctgtctctgccatttccactgaatctataaattgcccttataacaagagttctcatcttttttttttttttttaatgacgtgaatcctttaggcagttggtgaaacttgtggctccttttcagattaatattttaaatgaataaaataaaatgtgagattacaaagggaatcagttatgctgaaataccacttttgaaaaattaagaagtctttatatgtgcttctttactaatgccgtaaatagcaagatcaggcagcaggtctaacaagcactgtaatttcaaagtgttgatgggtatagatatttcaagaattataactggtctccctatgtctagttttagcctctttagtcagttttttttttctttttttttcctttttgaaatggagttttgctctgtcgcccaggctggagtgcagtggcacgatctcggttcactgcaccctccacctcctgggttcaagcagttcttctgcctcagcctcccaggtagctagaattacaggagcctgccactacgtgcctggctaatttttgtatttttggtagagacagggtttcaccatgttggtcatgctggtcttaaactcctgactccaggtgatccacctgccttagcctcccaaagtgcttgggattacaggcgtgagccaccacgcctggccttcagtcagttctatacctgtgtttctgattcccttcccctcccctcccctcccctgccttccctgagacagagtctcactctgtcacccaggctggagtgcaatggcatgatcttggctcactgcagccaccgccttctgggttcaagtgatgctcctgcctcagcctcccaagtagctgggattacaggcacgcacaaccatgcctaatttttgtgtttttagtagatacagggtttcaccatgttggccaggctggtcttgaactcctgacctcaggtggtccacctgcctcagcctcccaaagtgctgggattacaggcatgagccaccacatccagactcttcatcttctgttattgaagtaaagtacagatttctcagctttttagtaacatcaccttttgttcttcccctggacaggtgtaaactccagccatattgaactatccagcacctggtacccagccttccgtgcttcagcttctgtagctccttcttccttaagtgctttttcgtgtgctgcctattaaaatcctacctgcttttcaaggcaccattaaataccaccttcttagagagaggtccacagatactaacatagagcagagcctgacagataataaacactcaataaattgtaggtattattaagtgagaattgttcataacttcttttcaataccatcattacctggttcccaataaatgaactgtaaatattttgagtaatatacatctataaactaagacaaagcagtattatcagtaagtgtaagcaagtttaaagtgaatgcgtaaatgattaatgtgtagaatttatttttaatctcagtttaaatgtttgtcagttttaatcagagcatagtgagaaaatgatttcatgggcagacatggacatttcttattcttcatacttaatcacaaaccccaccaatctataataagattgatttcgagtactgtcagtctttttttgtgaaacagaatcctcaagctcctaagaattctgttttttggccgggcgcggtggctcacgcctgtaatcctagcactttgggaggccgagacgggcggatcacgaggtcaggagatcgagaccatcttggctaacacggtgaaaccccgtttctactaaaaatacaaaaaattagccgggcgtgttggcgggcgcctgtagtcccagctacttgggaggctgaggcaggagaatggcatgaacctgggaggcggagcttgcagtgagccgagatcgcgccactgcactccaaccttgggagacacagcgagactccgtctcaaaaaaaaaaaaaaaaaagaattctgttttttaatacctttaatgtacttaaattgctaatgagtgtatatgtctgcctcatataaaatacaccaaaaacggaagtcttcacataggaagaaacaagactttaaagtactgtgtattgcattaaccatattaacatttgttgcttttcacacggtagtaaatatggtgttgaaaggaggagacgggcgggcgcagtggctcatgcctgtaatcccagcactttgggaggctgaggcgggcgaatcacaaggtcaggagttcaagaccagcctgacgaacatggtgaaaccccgtctctactaaaaatacaaaaattagccgggcatggtggcacacgcctgctactcaggaggctgaggcaggagggtcgcttgaacctgggaggcggaggtcgcagtgagccaagatggcgccactgtactccagcctggacaagaaagcgagactctgtctccaaaaaaaaaaagtggtagccgtattggaagtggtatagctgtgaggatcagattggttcattgctttctgaccttctgtgggcattggagaacaatagtaatgccaagtgccctatttacagggtcagggccacggacagacctaagtatttctacaagaaagcaagtaccttcaggatgtgggggtgggggggttatgagaaatgatagaacaaataaacatcagtgaaaggaactgtaccttaccacaaaaggaaagctttcaaatgaataaagtattaagaataaagaataggctgggcacagtggctcatgcctgtaatcccagcactttgggaggccgaggtgggtggatcacatgaggtctggagtttgagaccagcctggccaacatggtgaaactctgtctctacttaaaaaaaaaaaaaaaaaaattagctgggcttggtggcttgtgcctgtaggttgtcccagctacttgggaggctgaggcaggagaatcacttgaacccgggatggggagattgcagtgagccgagatcacgccagtgcactccaacctggatgacagagcaagattctgtctttaaaaaaaaaaaaaaagaaaagaaaaagacatttgaaatatccttgggtcacttgagcctggggcccactggtatttcatgtatcttggggctaggacaggtggaagctgagttgtcaagaccaaagtacttctggctaacagcctgttccttatggcatttgtggccacctgtaggatttttgttgtcatatcttcattgagaggcatcagataaggatactgtttttttcccgccctgcaaatttggttacaactgcagtaaagaagacatgagctatttagaacatacagttgtgtccttgaggaatttcatctaattggatggagactgcttgaacaggaccctgctgggacatgtgaggtttgtgaaataagcacccatttcttgtgagcctgctctttgcccatttatccagagctgtggctccccttcattctgagttggctgaaagggctccttgcctccgggtgacccagtgcaccatcctccccattccattctttcaacaaactgctacctgaggaaaagttataaaaatataaatgttgccatgcttaaagtctgtgcttagcatcctttggtggcttcccaggataaaattacgaaaatataaatatggcctggctcttgctcaccctccagcttcccctgtcatgtccctgtgtgtccgcctctctgcaggcactctgtcgccccaggttcccacaggcctctgcaccactgccccacatctcctctgcctggaatttactctcccttctcttccccctggttagccattggagccttctctttcaccctacccggtcctgcagccttcagcctcccctcccccagcccccgaccatggctttcataacatcctgtgcctctcagtttttcacctggatttaagtttttttcgttatccttgccttatgatcactctttaaaaagtagtcggctgtactctttctgctcctctccccatcctctccatttccttacttgaaccaaagttaccacacatcgtctggttgcatgcagattcagtgaatgctttccagttcttacttttctcagtctctcctgtttgaaatgccttccttctttgtcttgggaaacaccacccttttctggttctgctacatggttaagcagaactacatggcctctggagttggacaacaaaggttcttttttttttgagactagtctcactctttcacccaggctggagtgcagtggcacaattttggctcactgcaagctctgcctcctgggttcaccccattctcctgcctcagcctcccaagtagcgccagccaccatgcccggctaattttttttgtatttttagtagagacagagtttcaccgtgttagccaggatggtctcgatctcctgacctcatgatccacccgcctcggcctcccagagtgctgggattacaggcatgagccacggcgcctggcctaaaggttcttactccattatcatttctttccactttctttaactgattcctcatcctcatgctgctcctgagttctgtcttccgacttcttttcttgaaattctctctctgcaggagtgctaatcactgtggcttctgttaagaattcccaacttgatctctctcctgatgctgctggaaggatggaaccgtcatctcctccatctgaatcactgacaggcattcttagatttttaaatcaggatgctgaaaactatctttgtcccttacctccaccttctttttgtacctcccagacccaggcccacctctcacgtttataaggtctaggtcaagaatacaaatggagccctacataccattaaaaaaaaaaaaaatcaacctaagaaacattaagcagactttgctctctcctcctgccatgacagatatgccttcttttccttttttttttttttgagatagggtctcactttgtcacccaggctggagtgcagtggcacaatcatggctcactgcagcctcaacctccctggctcaagtgatcctcttgcctagtcccccaaatagctgggactacaggcgagtgccaccatgcccagctaatttttgtattttttgtagagacagggtttcatcatgttgtccacactgatctcgaacacctggattcaagtgatctgccctcctcaccctcccaaagtgctgggattacaagcgtgcatcaccatgcccacaccaggcctaatataccttcttaatgacctggaaggttgggttcaaatagaaaatactcaggctccttagagttctatgtcagtagttccggcagagcagaccttcagcatagtgctcttcccttcccagccacagcactatccatgtgttgtgagcttgagcacgtgtgtggcctcctgcctgcacaatgtaggtgcaatacacgccagcaagcagctgcccctttgaccaccacctcaagtgcacctgctgggtacagactacacttttccagatgcagggaattcccgggcacctgaggagcattttccccgaccccaataaccttctctcatgggcatgggcatgtctgggtgagggttagtggccagtgaccacagatgtctcagtctcttacctcgcctcctgtttcctctttcttttctttgcggtcttgcttttctgtcagaagcctactcatccttcaggataaggcttttgcgggcctcatcttcttttaatccttcccttagtatttgaagttaacccagctcctccttgggtttcagaagtgctttaatgtgataaaaggcaaagtatgttctctgttcctgtctccttctctcacaaaattgcaagtttcttaagagcaggatcattatttgtttttgccaccagtcctaacatgaagcctcacaaatgggaagttcttgacaagcgtggcttgaattcaccagaactctgtcttcatttcgtgttgttgtggtaaccctatcaaaacaggaaataaagctagtttagcatgacttgttcataattgactcatgctggttccctttccttccctaagcaatcataaaacatctgttaaataatctacttcagaatttcatggacttctacgtttattgatcggtacacttctagaatctgtatcccaattgccccagcactggaatgaatcatgtggccaaagaaccctggttctttttttttttttttaactgctttactaagaagtaattgatatacaaaatattgcacacatttaaagtataaagttggataagttttaatacattatacacctatgaaaccatcaacacaattaggataaggaacatactcattgcctccaaaagttacctcatttccatttgcaatcttcttcctcccattcccaggcaatcctgggggtaaatccaaagtaaacccaggattactttgtattttctatagatggaaatacatttcttttggtctggcttcactcaccataattacttgagattcatctgtgctgcatatatcaatagttcatttcctgttattatcaaataggaatctcatttccttttattatcaaatagcaggaatctatctgttttgagacttgagatgggtgtgctcacttcagaccttaatgtcctcccattctccataatttatgggtcttaggatagaattcatctgggacttgaggttgtgttcatttaagatgactagacactctcaatatcttgggttcctcaagggaagagtattattattattattattatttttttttttttttgagatggagtctagctctgtcgcccaggctggagaacagtggtgcagtctcggctcactgcagcctccgcctcccgggttcaactgattttcctgcctcagcctcccaagtagctgggactacaggcgcatgccaccatgcccagctaattttttttttatctttagtagagatggggtttcgccatgttggccaggctggtctcaaactcctgacctcatgatccgcctgccttggcctcccaaaatgctgggagtacagatgtgaaaaccacccccagcccagagtattatttataatttttgcgtcctaatgttagaatagttcttgatatatagaaggtactaacccaaagctggataaaagtttccccctttattggccaggtgtggtggttcacgcctataatcctagtactttgggaggctaaggcaagaggatcacttgagttcaggagttcgagatcagcctgggcaacattgtagaaccctgtctctacaaaaaaactttttaaaattagccaggtgtggtggtgctcacctgtggtccccactatgctacttgagaggttggggctgcagtcagccataattgtgccagtacactctagcatgggtgacagagtagcccatctcaaaagaaataaaagggccaggtgcagtggctcacgcctgtaatcccagcactttgggaggccgaggccgaggatcatgaggtcaggagatcgagaccatcctagccaacatggtgaaaccctatctctactaaaatacaaaaaattagctgtgcgtggtgacgggcaccagtagtcccagctactcaggaggctgaggcaggagaatcgcttgaacccaggaggcggaggttgcagtgagcccagatggcaccactgcactccaacctgggcaacagagcgagactccatcaaaaaaaaattaatacttaatttttttccctctttaacatgtttctttcccccttaaaaaaattttttttaagctaggtgccatggcatgtgcgtatagtcccaactactctgaagcctgaggaagtgatctcaggagttcaggaccggcctgggcagcatagtgagacttcatctctctctctctctctctctctctctctctctctctctctctctctctctctctctgtctctctcgctttttttccccctgagatggagtcttgcagtgtcgcccagagctggagtacagtggcgtgatctcagctcactcaacctttgcttcccggattcaagcaattctcctgcctcagcctcctgagtagctgggattacaggcgcgtgccaccacgccctgctaattcttgtatttttagtagagacagtgtttcaccatgttagccaggctggtctcgatctcctgacctcgtgatccacccacctcagcttcccagagtgctgggattacaggcgtgagccaccgtgcccagccgagacttcatctctttacaaagtaaaattgttttggttaattatatgttttggtaaaaagcatacaatttgccatcttaatcatttttaagtacacagttcagtagagttaagtatattcacattgttgcacaatagatctagaactttttcatcttggaaaattgaaaacctgtactcttgaacacatctccccatttctccctctcctcagccatttttaaccaccattctcctttctgattctatgagtttgttaattttggatacctcatataagtgaaattatgcagtatttgtcttttgtgacttatttctgttgatataatgtcctcaagcttcatccatgttatagcatgtgatagaatgacctttttggtttttcccccacctttattggggcataattgacaaataaaagttgtatatatttactgtgttaaatgtgatgttttgatatgtgtataccttgcgaaatgatccccacagtaaagctaattaagatacccatcaactcacatagttaacgtttgtgtgtggtgggggcaagaacatttttttttttcttctttggagacagtttcactcttgttgtccaggctggagtgcagtggtgccatcttggctcactgcaacctccgcctcttgggttcaagtgattctcctgactcagcctcccaagaaactgggactacagacgcgtaccaccacgcctggctaactttggtatttttagtagagacagggtttcaccatgttggccaggctggtgtcaaactcctgacctcaggtgatccgcctgccttggcctcccaaagtgctgggattacagacgtgagccaccgtaggtggctgataatagccattctaatagctgtgaggtgatatctcattgtggttttgattggcatttttctgattagtgatgttgagccttttttcatatacctgttggccatttgtatgtcttactttgagtaatgtctattcgggttctttgcccccactccctaccacccgcacctgcttttttccatttttgagacagggtctctctatgttgcccaggctggtcttgaactcctggtctcaagcagtctgcctacctcagccccctgaatagctaggactacaagcaggtgccactgcacctggcctttgcccatttttaaatattttgtttgtttcctgctgttgaattgtgtgaatttcttatatatttaaatattagccccttatcagatatgtggtttgtaaatattttctcccattcattgggttgtctcttcactctgttgattgttgcttgtgctgtgcagaagctttttagtttgattcaattccatttgtctgtttttgcttttgttgcctgtgctttgggagtcacaaccaaaaaataattgcccagaccaatgtcaagaagctttccccctgtattttcttctagtagtttttgtttgtttgtctgttgtttatttgtttgcttttgcttttttttttttttttttttttgagacggaatctctctctgtcatccaggctggagtgcagtggcacgatctcagctcactgcaagctctgcctcccaggttcacgccattctcctgcctcagcctcccgagtagctaggactacaggcgcctaccaccacgcccggctaattttttttttttttttttttgtatttttagtagagacagggtttcaccgtattagccaggatggtctcgatctcctgacctcgtgatccacccgccttggcctcccaaagtgctgggattacagggtgagccattgcgcccagccttttctagtttttataatttcaggttttacaatttttgtctttaatctgtcttgatttgatttttgtatagggtgtgaaataagtatccattttattctttagcaagtagatatccaattttcccagcaccatttattgaagagactatcctttatgtttggactctttattctgttccatttgtctatttgtctgtttttatgccagtaccatgctgattccctgccccccacccagctttattaaggtataattgacaaatacaaattagtatatgaaactgaggtggaagtgctggaaaaataattagtatatattcatgatatacaacatgatgttttgatatatgtgtatattgtgaaatgattaaagcaaggtaattaacatatctgtcatctcacatactttttgtggtgagaatgtttaagatctaatcttttagtaatttgcaagtatataatacattattattaactgtagtcaccatgctgtaggatagagctctagaacttattcatcctggttaactgaaactttatactctaacaaattatctgcacatttcaccctatccccgcagtgttgtgctgttttggttactatagctttgtagtgtattttgaaatcaagtgatgtgaagccaccactttgttcttgctcaggattgctttggctatatgggatcttttgtggttccatatatgaatttaaagattacattttctgtttctgtgaaaaatgccattggaactttgatagggattacattgactctgcagaccacactgagtagtgtagacactttaagaatattaagtcagaccaggcacaatggctcatgcctgtaatcccagcactttgggaggctgaggtgggaggatcacttatgaccaggagttcaagaccagcctggataacatagtgagaccccatatctaccaaaaagtttttaaattaaaaacaattggccgggtgcggtggctcacacctgtaatcccagcactttgagaggccaaggcgggcagatcacgaggtcaggagatcgagaccatcctggctaacatggtgaaaccccatctctaccaaaaatacaaaaaaaaaggaaattagccgggcgtggtggtgggcccctgtagtcccagctactcgggaggctgaggcgggagaatggcgagaacccaggaggcggagcttgcagtgagccaagatgcgatactgcactccagcctgggcgacagagcgagactctgtctcaaataaataaataaataataaaaacaattaggcatggtttttggatgctgaattgaatttctttgtgtgtgtgtgtggttttttttttttttttaaagactgaataatattccactctatgtatatgctacattttctttatccattcatccatagtggacatttcggttgcttccacatcttgggtattgtgcgtaatgctgcacaatgaacctgccagtagctcttagagattctactttgaattgttttggatatatgctcagaagtgggattgctggaccatatgggaattctatttttaattttttgaggaatttccaagtggttacaccattttgcacactcaacaatagagtatgaaggttcaaatttatccacatcacacttacggttttctgtttgtttgtttgtttgtttttaaatagtggcagtcctggctggtcgtggtgggtggctcacgcctgtaattccagcactttgggaggccaaggcaggcgggtcaccaggtcaggagatcctgtaattccagctactcaggagactgaggcaggagaattgcataaacccaggaggcagacgttgcagtaagccgagattgagccactgcaccccagcctggcgacatagcgagactccgtctcaaaaaaaaaaaaggcataacgttgaatacacgtttcaaaagaagacataagaaaagatggtcatcatcatgaatcagagaaatgcaaatcaaaaccacaatgagctatcaccacacacccattaggactgacccccactttttttttttttgttttttgagactgagtctcactctgtcaccaggctggagtgcagtggcgcgatcttggctcactgcagcctccatcacctgggttcaagccattcttctgcatcagcctcccaagtagctgggactatgggcgcgcaccaccccacccagctaatttttgtatttttggtagagatggggtttcaccattttggacaggatggtgtcaatctcgtgacctcatgatccgcctgccgtgacctcatgatccgcctgccttggcctcccaaagtgctgggattacagacatgagccaccgcacccggccttcttttttaatgaaccatctttggattcctgtgataagagacacacttatagcaaaaacctgtagtgtggtggtagttagggacaaaaggggttgagcaaaacaagacacagttggtaatgtcaaagtgattttaaagcataaatgtttatagacacctgaaagttcatggtatgccttatttaccaagtatcaacaataaaatatgtaaaacaaaaccgagaaatccaaggagaaactagcaagtatggaatcattatggaagagtgtaaccctctttgtcatcagttctatgaaagatagattgcataaaccaaaaaggcagcagaatggttaagcggagcagacaggaacagacaaaactcctttttttcaagtgggaccagatgaggatgatctcatattttcttacttaaaaggaggcagttggccgggcatggtggctcaccctgtaatcccagccctttgcaaggccgaggcggggcctatcacgaggtcaggagattgaaaccatcctggctaacacggtgaaacaccgtctctactaaagatacaaaaaattagccaggcgtggtggcggggcctgtagtcccagctactcgggaggctgaggcaggagaatggcctgaacccaggagggggagcttgcagtgagccaagatcgcaccactgcactccagcctgggcgacagagcgagactgcttccacaaaaaaattttaaagaggccgggggggagggcagttatttcgtcactgagtgttgatacagtagaggggcacactgaccataaactcctctctccaaaaattttgttggattataattttgcagaacaaattatgaccacttgtgactgttaacactagaaatttataatattaacactagaaaattgtaatgttgagtttaaaccagcattttataactaatccgtgctgttgttgaactcttgttctatgatttgaattaccaaaatagaatttttttctaaaaatattcccaatattgaataagcttgcttattatatatgctttttaatactatgttaaattattactattatatatgctgttgcctaactgaaaatcactggcttagggcctcatgtaccaaaccaaagcaaaataagatttgagtagtggttattttacttaagaaaatatacttcatttcaaagcatttggggccacctgtgtactatatgttaatggtgttgtaggataattggatcctagtaagacaaagttctcctccagagcattatcttgtcatagaatcagacaaatgtatcaataattcttaggattagtagactgataaatattatagaagcataaactttatttaatttagagacggagtctcactctgtcgcccaggctggagtgcagtggtacaatcttggctcactgccacgtgcatctcccaggttcaagtgattcttgtgcctcagcctcccaagtagctgggattgtaggcacttgccaccatgcctggctaatttttttgtatttttagtagaggcggggtttcaccatgttgtccaggctggtctcaaaactcctgtcctcaagtgatccagccgccccagcttcccaaagtgctgggattgcaggtgtgagccactgcacccggccctagaagcataaattttagaataaagttattttactgctttctattctagcacttaccccaaggaaacaagaaatgttgtcttactgcctgtcaatgttatttgattgctttggtcagtgggccagatgttgacatttattaatatgaaaatttcttatacacaagattgtaatagaatgtttatcataaagatagtagtaatactcaagattcaaattcataaaattgaaggtataatttttattattgcttttgcttataattctggtttatcagacattaaggacaactaggaaagaactgggccccatgttattgccacaaatatgttttttgaagaatacttttctaggttttgttataaaactacccaaacatcttgattcagtttcttgggggaagaaatggtcatgttgttttgcaagtgagagaaacaaagttaatagaagtaatcaaggtgttctcttgggtccatttttgttagggataaagatgtacagttgtaggttatttgaatgtttcttctgtgtcagaggaatttgatacaacagtaagaaggtgtttcagagacagaagtgattactctcaccagaatgcagttgctgtttaagacaatgggagaatgcttgtttgtgtatttctgggtttataaaggcaagactttcacccagttaacagggctaggttctctgttagttttgagagtcactgtgtgctctctcatgtcagttgcatccatcctccctagcttgaggcctttttgtggataatatacatgntgccttcacgggtatgaaacaggtgtttacacagtgttaaaaatataatactttaccaacttgccttcttcaaatattctgagggctgtttttaatgccatctctctctctcttttttaagctctgcttatgataatgtcaacaaagttcgagtagctatcaagaaaatcagcccctttgagcaccagacctactgccagagaaccctgagggagataaaaatcttactgcgcttcagacatgagaacatcattggaatcaatgacattattcgagcaccaaccatcgagcaaatgaaagatgtgtatcctttttaggcaactggccaattccactgcttggtaaccttgttgagtaaatagaacttgaaatttcctgaacttaaaggaaaagtgcattaaacatgctaaagggaaaatcgtaatctgtttgctatttactccctaagtctagtcatggaaaatcttggttaactctgtttgcagtcatgtttcttctgtccaagggatggtttgttgtgatgatgaaaaggtaaagggaagatcagtagtagactaagaaagagggtgccctggctatctacctggtgaaatcaggactgtcctgatcttaagagtcaggttaccactttaggtctcagtttccccacctttaaaatgaaggaactggtcgtcatgatctttaaggtcaactgaggtctgaaattatgtgattaactctgaccaacatttagaaatctggactgaacagatctagaggatgctgcctgggtaaaggctccatttgaaagatagagaggttaagtatactgaagaggatctgccagaagggaaagggttatacagcactcctaccagtttacccaatttgtattccgcccctccagggtgcgggagctcgctgtttctaggcagccctttccatttttaaacagctctgttaataagttgtagtgatatttgaagtgaaatgcctcctgccactaccacctgttggtcctgctttactttttgccatgaaaataagcctctctcagatgacagatttttaaatcatgtttcctttgaatcccatgctgcgcctcctatagcataaatctgtaagaaacagagactagtgtttacacagaagtgagtaaaagaaatgtagaaatactgctaatgaaataatactatgatgaagttaaaggctaaatgctttaataatttaatttctgtgagaaagaaagtagccatagctaaacttttaggtagttaagtacgtgaccaggcaagaaagcatgaggaggaaaactagcacaaaccccttcttagaacgacttgcccatagtcttacttatttaagatcttaacagtaatggaagagtcaagaaaatagacttagggttggatttactagtaagagtatgtttctagacctgtatttctggaagttttatgtttggcttttgaggagcttgggagaggaggggagcggcaacaagaagtaaaaagaatagtgacattacaggttactggaccaaacagaggagggagtatctgctacttacaggctaacagtgtttccagcaaaccttggagggggttcgttgatggtggacaatttagagagcaaagaggttgagacttcaagattgaccagaatttccctaacagcctgtttcagatctcagtctaggcccatagccgcatcagtcagatgtaatgctggaatgcctgccatctcacaggacctaaaaggagttaacgacttcagattctttccatgaaggaaaccaagttttcctcagtttcttctttcctttaagggcttcatggtgtaatgatggactgtttgggaagagagtcaagagaggatgcatttttgttttcaatgctttgctaaatgtgaccagctaattggtgttttaccttaacctgtgcaaacagatatatagtacaggacctcatggaaacagatctttacaagctcttgaagacacaacacctcagcaatgaccatatctgctattttctctaccagatcctcagagggttaaaatatatccattcagctaacgttctgcaccgtgacctcaagccttccaacctgctgctcaacaccacctgtgatctcaaggtcagccaggttatttactattaaggtgatatatattgaaaaaccctttcactgaagcatagttatatttgtcattattcatattttaaattacaccagaaatacccaaaaacatgtttatggcaaaaatgctaataaagtgtggtagtcctcttcttcttccttatcccattgctcctttctccccagagataccttttttttttttttcttaaagacagagtcttagtatgttgcccaggccggtctggaactcctgggctcaagcagtcctcctttcttggcctcccaaagtgctgggattatgtatgtgggccacagcaccaggccgtgataactaactactataacaaattggtggccagttgcggtggctcacgcctgtaatcctagcaccttgggaggccaaggtgggccttatcacctgaggtcaggagttcaagaccagcctggccaacatggcgaaaccccatctctactaaaaatacaaaaatcagccgggcgtggtggcatgcgcctgtaatcccagctacatgggagctgaggtaggagaaccgcttgaacctgggaggcggaggttgcagtgagccgagatcacaccactgcacgccagcctgggtgacaaagcaaaactctgtcctaaaaaacaaagtgtattttctcccaaagtattttctatgctcttgcatacatgtgtatttttatactttatatagataaacaggatcacgtacattatgtgttagtttttttgttcgtttgtttgttttttgagatggagtctcgctctgtcacccaggctggagtgcagtggcgcgatctcagctcactgcaagctctgcttcccaggttcccgccattctcctgcctcagcctcccgagtagctgggactacaggcacctgccaccacgcctggctaatttttctttgtttttgtatttttgtagagatggggtttcaccgtgttagccaggatggtctcaatctcctgaccttgtgatccgcccaccttggcctcccaaagtgctggtattacaggcgtgagccaccgcgcctggccttatgtgttagttttaaaatcatgttttgttggtgacatttttcttcaataaattttattcaaaagatagcagcagaaaacttaacgtcactgactttaatacctaataaggcattccaactaaataagaaaaccccaaattctttacagtcctcagagttctgaaaatatgcagcatttacatatttctgttttaatgggtgttacaggtaaacgagggaaatttatggatatcttagatgtgacggagcgatgtcgattcagtctaaaaaaatgcacaggaattcaagaagacctaaataaatgggaaggcatcccatgtctgtggatcataagacttaatactgttaagatggcagtattctccaaattgatttgcagatttagtgcaatccctatcaaagcccccagttgtttttttctgtagaaattgacaggctgatcccaaaattcatatggaaattcatatggagaactgatacacttcctgatttcaaaacttactgcaaaacacagtaatcaagacagtgtgctactggcataagaatagacatataggtcagtggaatagaagtgagagtcagtaaataaacccgtgtatctatggtcaactgatttttggcaaggatgccaggaccattcactggggaaagaatagtcttttcagcaaatgaatctgggacaactgaatagccacatacaaaaagatgaaaaaattaactcaaaatggctgggtgcagtggttcgcgcctgtaatcccagcactttgggaggccaaggcctgtggattgcctgagctccggagcaagaccagcctgggcaacatggcaaaaccccatctctaccgaaaatacaaaaaaattaatctgggcgtggtggcatgtgcctgtggtcccagctactcaggaggctgagtgggaggactgcttgagcctgggaggtggaaattgcagtgagcagagattgcaccactgcactccatctggggtgacagagtgagaccttgtctcaaaaggaaaaaaaaattcaaaatggattgaagaactcaattaaaagctaaaactttaatactcttagaaaacatagaagtaaatctttgcaatcttatgttaggcaaagcttcttagacatgacaccaaaagcacaagcaacaaaagaaaaaagtaagtggattccatcaagattagaaacttgtgctacaaagcaaaccatcaaaaaagtgaaaaggcaagccacagaatgagagaaggtatttgcaaatcatacatctgataagggacttaaaactagaatatatgaagaactcttataactcaataatgaaaagataaatagcctagtttaaaaaatggacaaaggatctgaatagacatttctctaaagaagatatacagatggcaataagcacatggaatgntagatgcttgacatcattagtcagtagaaaaatgcaaatcaaaattacattgaaacaacttcatgctaactaggatggctgtagttaaaaagtcagataataagtgttggtgaggattccactccttagtgaaaatgaaaacatgcatctatacaaaaacttgaacacaaatcttcatagtggtattgttcactatagccagtaagtagaaacaatccaaatgtccagctgatgatgaataaatacagtgtggtggatccacacagtagaagagaaaggagtgaagtactgataatgctacaacatggatgaatcttggaaacatgtctgtgaaggaaggcagccacagaagacacatattgtatgattctgtttacgtgaaatgtctagaataggcaaatccatagagacaaaaattagaattagtggattactgattgcctagggctagaggagttgggagaataaagaaggaaggaatactaactcactggaatttctttttgaggttataaaaatattttcaaattggatggtggtaatggttaatttccaccattataatactaaaaccattgagttatacactttaaatgagcaaattgtatggtgtgtgaattataggttaataaagctgcttaagtacatatatatgtatagcaataatcatttattggatttcagttcaacagacactcctatgagaagccctttgagatacgccagacaagagagatgagggtctgcccttgaaatctgaaaactgatagatcagaaatctggtagacagtaggtgattataatgagatgttctgtaactgagatggagaaaaagatggtgtacaaatgcaaaggagagaggtgggctagcgctggctgggactgggaggcagcaggaagaaggtggtatctgtgccggccctcgaggttgggtagcttttcttgcgggaggccagtggctctattggacatagggtatcataggcagagagtacagaaataaaataagaaggaagggactactaccgaaagcactgagtcttcctccctgtggctgcagcattggatgagtaatagggagtcatcgacactaagctaaaaaggttggttgcaagtagatcgtggggaaccttctagaactgtgtgtaaaaagcggtgggttttgtcacggtgggtgaacacggtggccaatgtccagtgagatgtaaaggacagcttccttcatcagatattgtgtggattggactctgtcccctcttaggatccttctgatacaggtttatgtcttttccacatgggatggaaccagctcctttacctggatcagtgcaaccaagagtcaggtgggcacaaaacgaataaagctatgtttaggatggctgtactacttctttggcacttaatgattgtcttgaaaatttgcagtgaatatttttatgtctcctcgtgttttttttttcttttggttatcatcatagccctgttatggcagattgcttttgtttttggagagacattctcaatcaatattttaagcatataacatttctgggaagaattggctcttatttttgcttgaaagtgttcatctttaagaataaaacaaatagaaccagactactctctctgttgtctcttcccagtttatggacttgtctttaaggccattctgttcacctactcacactcacacacacgagttgttggccgtggcataatttaggcatcgtcttgaaaacccaagttaacacaaagaatcagaagcataacaaattgactaacattttattttattttattttatttttattttatttatttttatttttattttatactttttcgagatagagtcttgctctgttgcccaggagtacagtggcatgatctcagctcactgcaaccttcacctcctgggttcaagcaattctcctgctgaagcttcctgagtagctgagattacaggtgcccaccaccatgcctggctaatttttgtattttcagtagatacggggtttcaccatattggccaggctggtctcgaacttctgatctcgtgatccgcccgccttgacctcccaaagtgctgggattctacaggcatttgccaccacacccggcctttactgatattttaaaagtatacagcagtcaggtgccatggctcacgcctgtaatcccaacacattgagtggctgaggcaggcggatcgcctgaggtcaggagttcaagtccagtctgaccaacttggtgaaaccctgtctctactgaaaatacaaacaaattagctgggtgtggtggcgcacacctgtaatcccagctacttgggaggctgaggcacgagaatcagtgggaggcagaggttgcagtgagctgagatggcaccactgcactccagcctgggcaacagggtgagactccatctcagaaaaaaaaaagtatacagcaatgtgtgtgcatcattctcatgggtataaatgcgagaagagagaatctcattcaaagatgagtatggtatgtcactgatttgttacagtgagcgtgtcaaagcagggcaagaggcagtggcagttcagtgtgcatatgacagttgagaacaccacatgaggagaggacttgtgtttgctggagctctgggatcactgcacatttatcacatcctcagtgccatgtgaccatgatgcctattcccacaggccccttggcctaggaagtttgtaacttgcagcgtcactgacctcctgttatttaggtcctttcagattttcaagaagatttcttcaaccttcatccaatgacttctatgttacagtgttttttactcttgaacccttaccaaaatatcttgaacccttatcgatatcagctattatcagtgtcttagacctttaacttttggctctgttatcagtcaaggccgacagaaataagcttgctttttggtttccataaacatgctttgcacttattttatgaagcttaagacccagcagacattgacatcttaggacccttccgggatcctctcttgtagactttattcttcaggaccacaggaactcaccagggttacagaccctatttggaggctctgctagcacatttctagtgtaactaccagggaacgtgagctatactagtctgtgcccttgtttactagactgatcccacagaaatcccagtaggagtcacaagatgctgggatcacaacatgtgaaaattctggctatgcctatgaaagaaagactctgatagatacaaatgaaacacgtctttggggcatcctttgtttttgaaaatctgaatttacacagcccaaaaggtatattttcttgtaccatatccttatttattttcctttgtatggaattatactgagtactactgcttttttattttgtagccttggcattgtattgattagtgtcatgtaaatttggttagtctttgattttatagtgttgacagaccttaaaaaaaaatcatggccaggcatggtggctcacacctgtaatcccaacactttgggaggctgaggtggttgaatcacctgaggtgaggagttcgagaccagcctggccaacgtggtgaaaccccatctctactaaaaatagaaaataagccacaccatgatattggagggccagatgatgaaaggccagtagatgcttgagaccggagaaaatgagaaactatgtattttttaaaaataaaatattcttaagtatatgaaactttaaaaaaaaaaagctttgggagtaggtttgactacctagaagaaggaagtgggaagaatctttggaaatacttatatttatagactaagtagaagactagcagaaagtagagtctgagaatagaaggccagtgcagatcttcacagcagtcctgagagctccagcaggacaggctgagaaaagggtactggttggttttggtgactactcagaacagtttttgtcaattcacctattgagattgctttgtgctaagcagataatgaaaggtagggatgcttcttaaagtgtgctctgtaaagacttcttcagcctgcatcctggtctctaacatgttgattgcttttcaggttgttgggaaaattaaataatgattttctagaatgcccagaaagtatctgccacttagtagcattattattcctattgccttttttatttttgtgatgttttgatatgaaaggttagaatttctaagaagttatcctgttttttttctctcttagatctgtgactttggcctggcccgtgttgcagatccagaccatgatcacacagggttcctgacagaatatgtggccacacgttggtacagggctccagaaattatgttgaattccaaggtaaggatgaagtttgcataaaaagaaatccagtaagtaagagaactttctgaatgcattgcagtaagccgtaagtctccctctgcgttgagagtttgcctgtctggccagagacaaggtgctgtcttttttgagacagggtgttactctgtcacccaggctggagtgcagtggcaccatcacggcttaccagtctcaacctcctgggctcaagtgaccctcctcacctcagtctccggagttgctgggactacagagtgcaccgctacacctggctaatttttttttttttttgagatggagtctcactctgttgcccaggcagagtgcagtagcacaatctcagctcactgcaagctccgcctcctgggttcacaccattctcctgcctcggcctcccaagtagatgggactacaggctcccgccaccatgcccggctaattttttgtattttttagtagagacggggtttcaccgtgttagccgggatggtctctatctcctgaccttatgatccgcccacctcagcctcccaaagtgctgggattacaggcgtgagccactgtgcctggccacatctggctaatttttaaattttttttgtaaaagtagggcgtcttcctatgtcgcatgttgcccaggctggtcttgaactcctgagcttaagggatccacccacctcagcaccccccacgccccccgcaaagtgctgggattacagggatgagccaccacacctggccccaaggtgctgtctaaattttgttcggcattgaacttctgggccctagggctcagcctctctacctcagctgatatagtgctgacggttgtagagtaggagggggtgtgcctctccagtcactgttaccataagtggtctgtgtttcactccttggacagctgtcctgaagtcctacctatcgctgtcactgttaggtgcaggctgggtttgttgtagaggttattcagtaatgtgtatttctgtgaacatgggccagggctattctataaaggtcaaatttatctgataatgaagaatgtctcttcggcagaattatattgtaatttgttgtacttgaagaaaacataaatgtggacagagtaggaactgccgtggattcttttgaaattacgtgatttcctgcttccaaatgaagtgctttcctctgcatctgtgagtggctatagagagtgcatccaggtctcatccacactctactagcaaggtctgtgtcttggtcataagaaatggttgaataagtttacaaaagcccagaaaagtgaagtctgacattttttgttgggtttatgagccaggaggcaaaaattgagggctgctatggagattgagattcagtatttttctgttatttgcaaataatatatgaataaggtgtgaaaattgagtagttaagtaggcctgacatactacctgtatctagtatctcaggattataagattcttaaacacagttccctctgctgtcatgtaaagatacttgaagaaaagcaataaaaatagacattggatcttgtatctagggcccaggaaccagaaatagtcctgagaggcttagtggaaatgaaagaacaggtctaattagcttatagtcttctttttcttcctccatcctttattactagtacagataagctattagattttttcataaggaaatggaatttgtttaaagcatttagtttttcttgatatcctacatttgttcagtttagttataaaagtaaaatctcattaacataaattccattataaagaaggatttggtgtaacagatgtttcagagaagaaaatgccatgttgattctctgtaattctatatcacaaataatcccacacaacaggttctttctctgactggccacgtgacagccattctaaacaaggagcattggcatgccagtgttcagtgccagttgtaaagggagctgttggtgtgcctttgtcctggtgtggcttggtcttgcagtctccgttctgacttagacgccgccactgtctccacttctctattaccctccagggagaagtagccagagagggtgttcttcaagatgaccagcttttccttctacttgcagggtcaccaaagtgaaaattgagtgttcatttttttcttatttgcgatacctgtagcctgagaatgttacttctagcagttgtcttcattttgtttatttttattaatgtagaaaattatcaaacccatagaaaaattgagagtagagtgaatacccatatgcccctgtccttggttctccagctattaacaccttgtcatatttcttatccctccttccctctcttactctttcctttctctctctctttcttcttctgtctcttctcttttgtcagaccatgtgacacttcaccaacatataacacttcactcctagaccctttggggcatactaatgctccttacaaggaaggtgttcttcccacagctagagtacccttaccctttcataaaatgatcagcattaattccatgacatcccatcctcccaaaaaagtctaggtaactctgttttcaacacatgatttaattgtttcatgcattattcttagtctagaacagtcttgcccttcctctcttctttaagacattcagtactttgcaatgtacagatcagttgtttcacagagtggttcacattgtggattcctccagtgagttctttctgatgagatgtagcttgcacgtttctaacacgaccactacagattcctgaagacggtgcagaagtagctgggactacaggtgcccgccaccacgcccggctaatttttttgtatttttagtagagacagggttttaccatgttagccaggatggccatccttgtttcccagcagccttcccccagtggttcagcactcacttctgtcagttatcatactggaggttataaaatggtaattttctaaatttgttctttcttttacttgtattagctagaattctcctatgaagatttttcccatttaccctttctcttcctctgtatcctacctttgtttttaaaacactattgcagacccaggattttttttttatgtgttctccattttaattttctttcttttttttttttaaactcatattgtcccagttttgagaagctagagcactctgtgtacatatttgtaacgttttatagaatttcagctttcagaaaacttgcgctgttttagcttgtttaggaaagaaaaaaaattttttaaagaaaagttgctgggtgtggtggctcacacttgtaatcccagcactttgggaggccgcggtgggtggattactcgccaggagttcgataccagcctagccaactttgtgaaaccccatctctactaaaaatacaaaaaattagccaggcatgatggtggacacctgtaatctcagctactcaggaggctgaggcatgagaatcgtttgaacccgggaggcagaggttgcagtgaggcaaggtcacaccactatactccagcctgggtggcagagtgagactctgtctaaaaacataaaagttgcaagaaaagtataaggtagccattctcaaaccttcttgtctcaggatacctttacatttctttctttcattggttcattctttcttttgttctttctgtttttttttttttgagaccgagtctcactctgtcacccaggctggagtgcagtggtatgatctcggctcactgcaacctctgcttcccaggttcaagcgattctcatgcctcagtctcccaagtagctgggattacagatgcatgccaccaagcccagctaatttttgtatttttagtagagacggggtttcaccatgttggtcaggctggtctcaaactcctgacctcaagtgatccacccccctcagcctcccaaagtgctgggattacaggtgtgagccactgcgcccagcctcttttttttttgagacagtcttgctctgtcacccagatggagtgcaacggcaccatctcggctcactgcaacctcggcctcctaggttcaagcagttctccctgccttagcctcccaagtagctgggattacaggcacctgccaccacgcctgcctaatttttgtatttttaatagagatggggtttcaccacattggctggtctcaaactcctgacctcagatgatccacccacctcagcctcccaaagtgctgggattacaggcatgagccaccgtgcctggctttttttttttttttttttttttgagacggggtttctctctgtcacccaggctggtagccaccccctcctcaagcgatcctccagccttgcctcctgtgtagctgggactacaagcgtgtaccaccatgcccggctaatttttgtatgtttttgtagggacagggttttgccatgttggccaggctggtctcaaactcctgggctcaactgatccacccacctcagcctcccaaattgctaggattgcaggcatgacccactgcgcccagccaagatccctttacatttgttaaaaattatcaaggaccagctgggcatggtggctcacacttataatcctagcactttgggaggccgaggcgggtggatcagttgagcccaggagttcgagaccagcctggccaacatggagaaaccctgtctctactaaaaatacaaaaaatgcactgggcatggtggcacacacctgtaatcccagctacttggaggctgaggcaggagaatcgcttgaacctgggaggtggaggttgcagtgagccgagatcttgccacagtactccagcctgggtgacagagtgagactctgtctcaaaaaaaaaaaaaaagtcaaggacccacacacctttttttagttacgtaggttatatctattgttatttacaatatgaaacttttttttttttaatttttggagagaagtctggcgcttgtcccccaggcttgagtgcaatggctcaatcttggctcactgcgacctctgcctcccgggttcaaatgattctccggcctcgcctcccgtgtagctgagactacaagtgtgtaccaccatgcccggctaatttttgtattttttagtacagatggggtttcaccatgttggccaggctgctcttgaacttctgacttcaggtgatccacccgcctcggcttcccaaagtgctggggttacaggcatgagccaccacacccggcctacaatatgaaactttaaaatgtattaattaatttttaaatagtaaacccactacatgttaagataaattacatgtttttcttaagaataagtttattttctacaataaaaacgttttagtgaggccaggcatgatggctctcacctataatcccaacactttggaaggccaatgcaggaggatcaccaggagtttggaaccagccctggtgacatagtgagactctgtacaaaaaagaaatttatttatttatttatttattttttgagacggagtcgtgctctgtcacccaggctggagtgcagtggtgtgatctcagctcactgcaaggtccgcctcccaggttcacgccattctcctgcctcagcctcccgagtagctgggactacaggcgtccgccaccacgcctggctaatttttttgtatttttagtagagacagggttttaaccatgttagccaggatgggctcaacctcctgaccttgtggtccacctgcctcggccttccaaagtgctgggattacaggtgtgagctgctgtgccctgccatctgtacaaaaaattttaaaatcagctgggcatggtggtgtgcacctatagttccagccactcaagaggctgagatgggagattttcttgagcccaggaaattgaggctgcggtgtaccgtgatcacgccactgcactccagcctgggcaacagggtgagaccctgtctttaaaaaaagcaaaacgaaaaacaaccttttagtgagaagagtggcattgttttcatttttgcaagtctctttaatgtctggcttaatagaagacagttggattctcatctggttctgcattcagtctgtcaaatatgttgttttggtttaagttcatgaggaaaactcttttttttttttttttcaggctttaatcaatttaataatcaatataatattacatgcatagttcttcaaaaatgtcaaggaaaactctttcccatggattttaactgcttgaattcagagcatagaaaacagaagaaaacttgagtgcaatattaataaagaccctttaaaaaagatgttatataaaaagaaaaatcgcaagccagtgaaaaatacatgcaaaattctaaataacattttagcaaacaaaatctatgcttaaaagcataacacacaaaaaagtgagatttttccctagtatgtaacagtaatcagacattttatcaagacatttacaaataagcctaaaaatagatgtctgagtgctatttatgaaattcaagatctattcctcccatccaagcactaaccaggccaaccctgcttagcttccgagatcagacaagatcgggcgtgttcagggtggtatggccagaggaaaactcttcacacaggtatgtagctggaaaaaggagggaaattttagtagtcttttcagccacttgtggctattctttgatcctacccccagtttaaacaagtggtggtttcttaaaggttaattgcagtgtggaatctgaaatcatatcagtgaattcttgatactatttcgttaaaatccattagtctaccttgcactcatactcatgcatgattttttagcgtatttggaaaatactggttcactgagttacacagatattccaagtgtcacattttcatgtacacatcatcactcatcatattgcatctggaaaaatctncttttcactcgtgactgaaaaggatgaaaatgtcatagtagtataataaatgtactgtgacctctcagatcctctagagggaacccataggagtctctggaacactcttgtagaaccgccagatagaactcctaaataccctttaccccagattcaggctcaccgattttttatcttttgccccatttgctttatcattctttgtgtgcatgtgtgtgggcactcccacgcactctgagtcatttgagagtaaattgtagatacaccccttcaccttgtttcagtatgtctttacttcaaaccatggtcctgttgttccctggggacatgtggcagggttgtcacagtgaggggtaggggtactccctgcatcaagaggccagagatgctgctaaaaatcctacgatatacagaacagccctccaaacagaaactttctcagcccaaaatgttagtcataccgaggttgaaaaaccctgccttaagagtattctctaacatgaccacagtacagttttcaaaatcaagaaacttaatactgattcagtatctaatgcacagtttatattcacattttagatattatcccaataacctttgaactataccccacccaaaccaccccccgacctgggcacaggttcacatgttgtactgtcatgagttttgtttgtttgcttgtttgcttgcttgttttaagaccaggttcgcaggccagccacagtggctcacacctgtaatcccagcactctgggaggccaaggtgggtgaatcacatggggtcaggagttcgagatcagcctggccaacatggcaaaaccctgtctctgctaaaaatacaaaaaatttagctggacatagtggcaggcacctgtgatcccagctactcaggaggctgaggcaggagaatcgcttgaacccaggaggtggaggttgcatgagctgagatcgtgccattgcactccagcctgggtgacaaagcaagactccgtctcaaaaaaaaaggacgggttctcattctgtcacccaggctggggtaccgtggcaccatctcggctcactgcaacctccgcctcctgggctcaaggccatcctcccaccttagcctcccaagtatctgagactacaggcacgtgctactgctcatggctgatttacttatttatttttgtgcttttcatagagacaggttgttgtgtttctttagtctcctttaagagtgcagatgagctattttgtagaatgcccctcagttttgggtcatgcatttttaacatgaataccagaaaagcacttcnttgtattagaaggcacttctggagccaggtatggtgcctcatgccgtaatcccagctctttgggaggctgaggcaggaggatcatttgagcccaggagtttgaaaccagcctgggcaaatagtgggaccccttctctacaaaaaatttaaaaatcaaccaggtgtggtggtgtatgcctgtggcccacctactgtgtgccagctactcagtagtgccagctactcaggacctggctgaggtgagaggatcacctgagacaaggaagttgaatttgcagtgaggcatgattacaccattgcacttcagcctgagtgacagagtgatgacaccatctcttaattttaaaagagtcagcttatattccttggagaaacatcttttttgcaccattgttatgattcagacagaatccttccatgattttttttttttttttttaatttttagagaaagggtctcactctgtcacccaggctggaatgcattggctcggtcacagctcactgcagcctccaatccctgggcttaagtgatcctcccacctcagcctcccgagtagctgggactgcaggtgtgagccaccatgtgtggcaaaataataataataatgataataataataataattagttaatacccagtgttgttgaggacatgaggaaatgcattttctttcacatgctgctattaggagtgtaacagtgcaactgcagtcatagttcactgcagcctcaaactcctggcctcaagcagtactcccacctcagcctcccaaagtatcctcccatgacttctaacaggattcctttaaaagaaaacatattcctgaaaaatgaataggaaaagaagatgagaattcttttattttattttatttgttatgttatgttatatgttatgttatgttttatgttatgtttatgttatgttatgttatgttatgttatgttatgttatgttatgttatatgttatgttatgttatttttggagatggagtctccctgtgttgcccaggctggagtgcagtggtgcaatctcggctcactgcaacctctgcctcctaggttcaagcaattctcctgcctctgcctcccaagtagctggaactatgggtgcccaccaccacgcccggctaatttttgtagttttagtagagacagggtttcactatgttggccaggctgatcttgaacttctgacatcaggtgattcgcccgtctcggcatcccaaagtgctgggattacagacgtgagccaccatgcccagctgagaatattttagaagagattggtaaaatatgatggagctagcacacactcccccaaacccagaaaaggtttttagaccttttttctttttccagctccaatttatgacaattctaaatctgtctctcaaattgtttcaaaaaaggacggatgtatactttggaaattctaatttaataagttaatcaactttgtgggtttgttgttgttttgagacagagtctcgctctgtcacccaggctggagtgcagtggcacgatcttggctcactgcaacctctgcctcctgggttcaagcaattctcctgcctcagcctcccacgtagctgggattacgggcacccactaccatgcccggctaatttttttgtatttttagtagagatggggtttcaccatgttggccaggctagtctcaaactcctggcctcaagtgatccgcccgcctcggcctcccaaagtgctgggattacaggcattagccactgtgcccagcccaagttaatcaactatgaagagaaaaataaaatcacataatcttggttgttcagcctctcataagaaagccaaattgttttttgcttttccatgttgtttacttgtatttctgaattgtagagtcaaaggagaagttcagagtcccatcagcaatgcacctgtcatacaggaagatctcatcatgtcctgtaacaccagataccattttcagtcttttctctctttctcctgcagggctacaccaagtccattgatatttggtctgtaggctgcattctggcagaaatgctttctaacaggcccatctttccagggaagcattatcttgaccagctgaaccacattttgggtaaggttcccgagcccttcaggagctagatttactcaagtttgtacagcttacatcaaagtcacttcattaaattaagaagagttctaatatactctttaacctgtggtaggtgtgaatttttaaccttctctgatttaaaatgttaaggacttttgtgtaaaaacataagaaaggtaaacatcaggagtggtgataagcaacggctcatatcaattatcagggttcattccgactcagagttgatggtgtgtagtcatttaccttggtcctgataactaatagctaatttttttatctgataggtattcttggatccccatcacaagaagacctgaattgtataataaatttaaaagctaggaactatttgctttctcttccacacaaaaataaggtgccatggaacaggctgttcccaaatgctgactccaaaggtaaatgttatttcgttgattagttttttcttaggcttagcttcgcgtttatttgttaaattgttaggtcactagcctgaaaaatgagcctatggctattggataatgctttctttagtgctcactctgaattgttgtcttccccctttttttttttggaaacagtggcagtgcagtaagggaacctggtaatgacggtctagttctccaccttttggtttctttgctaattttaatttgcattaaggtcactttttttttgtttttgtttgagacagtgtctcactctgtcgcccaggctggagtgtagtggcccgatctcggctcactgcaacctcctcctcccgggttcaagcgattcttctgcctcagcctcccaagtaactgggactacagacgcgtaccaccacgcctggctcatttttgtatttttagtagagacagggtttcaccatgctggccaggctggtctcgaactcctgaccttttgatctgcccaccttggcctcccaaaactgggattacaggcgtgagccacagcgttcagcctaaggtcacatttttaggtctcaggaagtctaggaccctgcaaacaaattacaccttttcatcttgtcacttgataatttttaaaatcaggtttattgaagaataatttacacagaataaaattcacactttttagttgtgtgggcctctgagttttaacaaacataaactgtcatgtaacaaccaccgcaattgagatgtggaatattcccatcatccccaaaagttgccttgtgccgtttgtagtcagtcatccctctgcaaccccaagctctggcaatcattgatctgatttatatccctatagttttgccttttccggcatgtcatgttaatggaatcatgtagtatgtagcctttttatgtctagattctcccattcagcataatgcatttgagatttataaaaatccatgtcattgtttgtgtcagtctcttcagcaaatggtgctggaacaattagacacccatatgcaaaatttacaaaactcaaaatggagcataaacctaaatataaggcctaaagttattaaccttcaagaagaaaacaggagagaatcttcatgaccttatgttaagcaaagattttttagagtacccatgaaaaaaaaaagtgatacatttgatttttttatccttttttttttttaggttagcttcgtttaataattgtattattctttattcccatttaacgtgtacctgttaaatatattaggcagctagtttttaaaacttcatgctgttataaaaccatgataggccgactaatgaccccccacccacccccatggctgtattctaatttctagagcctataactatgttaggttacctggcaaacaggaattatggttgcagatacaatcaagattgtttatcagctgaccttattttttttttaactgctccttacagagcagggctaatccacgggcagtgtggtatgccccgaataggcccatcagctgactttaaagataggaaggttatcctggattgtcttgtctaggtaggtggattatctaggtgggcccatttataaaaacagggttccttaaaagttgaggagggaatctgaatagggtgcttgtccttccatatctttatctacatacatgtgcatattttctctataatttattttttaaaaataattattataaaggttaacttttttaaaaattcagaaattatagaaatatttaagaaggtaaaattcttttataattattccctaaatgtcatggttaatagaattgtgtcttgaatatcttttccacatcagtgcatagatctaggttatcgttaatgattttatagcatttttatccagtgttctgttagaaatttagctatttctaacttcctattttatctgtatgtgtttatctatacatgcatatgaatatatgtgtatatgtatatttaacaactgtctacttaaatgttgaattggttttatgtattgacctgagtgaaggttgagaaatacttggttgtttagaaatgaatttcttttgaaaatgggagaaattttcttttaatctttcatataaaggtagaagaatttcatcattgtagacagttaagaagtatgggaggaatggtaagggagtaagatattgatcaccaggatcccacagtaacctttcactttttttgcactaatgtgtgcaagcttctgtgtggttgtaattatataatgtattttggttttggggtgttttgtggtttttttttgttttttttgttttttgtggtttttttttttgagacagagtctcgctctgtcgcccaggctggagtacagtggcgtgatctcggctcactgcaagctccgcctcccgggttcacactgttctcctgcctcagcctcccaagtagctgggactacaggcgctcgccaccacccctggctaattttttgtatttttagtagagacggggtttcaccatgatagccaggatggtctcgatctcctgaccttgtgatctgcccaccttggcctcccaaagtgttgggattacaggcgtgagccaccgtgcctgaccggtttttgggggttgggttttttttttttttttggagacgggtttggctctatcacccaggctggagcacagtggcacaatctgggctcactgcggcctccacctcccaggctcaagccatcctcccacctcagccacctgagtagctgggactacaggtaggtagtcccacctcagccatctgagtagctgggactacctgtgccaccatgcccagctaatttttgtattctttgtagagacagggtttcgccgtgttgcccaggatgatcccaaagtcttgagctcaagctatctgctcaccctgggcttctgaagagttaggattacaggtgtgagcaaccacacccggcctgtaatgtattttgatggtaggatatttttagctagaatgtcacatgcataatacatgttactgattagatttgcttgtatattataccacctaagcatgttatctaaatgttactaaatgttatttcctgagtcacttttttaaagagctgcataagcaacaaagctgcatcattaggcctggtaatgtggctcatgcctgtgatcctagcccattgggaggtcaacgcaggaggatcgcttgaggccaggaatttgagacctgcctggacaacatagtaagaccccatctctacaagattaaaaacttaaaattcagccgagtgtagtagtacctgcctgtagtctgaactacctggggaactgaggagggaggattgcatgagcccaaggaggtcaaagctgctgttagctgtgattgcatcattgcactccacgctgacggtgacactcttatctcttaaaaaaaaaaaaaaacaacaaaactgtaataaataggcctactcccaaacgttcctctcctgtttgtttccttactcttgtctgtaatcatgagttgcatcaaactatttctgattctttttttatgcttattttcattttcatttttttttctttcttttttttctgagacggcgtctcactctggctggcgcccaggctagagtgcagtggtgtgaacttggctcactgcaacctctgcctcccaggttcaagcaattttctgcctcagcctcccgagtagctgggattacaggcgcccgccaccacgcctggctaatttttgtatttttagtagaggcagggtttcaccatcttggccaggctggtcttgaactcctgacctcatgatccacccgtctcagcctgagccactgtgcctggctgcttattttcattttcttttttctcccctcccttctcctcctttctttcttcctttctttctttcaagtttcacttctatcgcccagcaggctggagtgcaatggcgtgatctgggctcactgcaacctctgcctcccgagttcaagtgattctcctgcctcagcctcccaagtagctgggattacaggcatgcgccaccacgcccagctaattttgtatttttaatagagatggggttttaccatgttggtcaggctggtctcaaactcctgatctcaggtgatgcacctgcctcagcctctcgaagtgctcggattacaggcgtgagccacagtgcccggccttcattttgttttttgtttttattttacttttttttgagacagaatttcactcttgttgcccaagctggagtgcagtggtgcgatcttgtctcactgcaacctccacctcccaggttcaagcgattctcctgcctcaacctcccaagtagctgggattataggcatatgccaccatgcctggctaattttttgtatttttagtagggatggggtttcgtcacagtggccaggccgttctcaatctcctgacctcaggtgatctgcctcctcggcctcccaaagtgctgggattaacaggcatgagccaccgcacctggccttactttgtttcttttgagatggggtcttactctgttgcccaggctggagtacaatggcgtgatcacgactcacttcagcctcgacctccctgggctcaagcgatctgcccacctcagcctcctgagtagctgggaccacaggcgcatgtcaccacgcccagctaattttttgtatttttcttagagacagtattgcatcacattgccagactggtcttgaattcctgggctcaagcaatctaccctccttggcctcccaaaatgttggaattacaggctgggcatggtggctcacgcctataatcccagcactttcagaggccgaggcgggcagatcatgaggtcaggagatcgagaccatggtgaaaccccgtctctactaaaaatacaaaataattagacgggcgtggtggtgggagcctgtagtcccagctactcaggaggctgaggcaggagaatggcatgaacccgggagggagagcttgcagtaagccgagatggtgtcactgcactccagcctggccgacagagcgagactccgtctctaaataaataaataaataaaaattttaaaaaattagctgggtgtggtggcaggtgcctgtaatcccagctacgcaggaggctgaagtgggagaatcgcttgaacccgggaggtggaggttgccgtgaggcgagattgcaccattgcactccagcctgggcaacagagcaagatatggaaagatgttagacctacaaatgccagtggtatgaacattcacacaatcctgtgacgcaggtactatcgacaatcgtctataaaagaaaactgactgggtgcagtggcgcatgcctataatccgagcactttgggaggctgaggcgggaggactgcttgagcctaggagttcaagaccagcctgggcaccatagtgagaacccatctctacaaaaaatacaaaaattagccagatgtggtggtgcatgcctatagtcccagctacttaggaggctgaagtgggaggactgcttgagcccgggagtttgaggttgcagtgagctatgatcatgccactgcactccagcctgggtgacagagcaagactccatctcaaaacaaaaccaaacaaaaacacaatctaaaagtagagacggggtttcaccatgttagccaggatggtctcgatctcctgacctcctgatctgcccgcctcggcctcccaaagtgctaggattacaggcgtaagccactgagcccggcctaatttttttttatttttagtagagacggggtttcatcatgttggtcaagctggtcacgaactcctgacctcagttgatccacctgccttggcctcccaaagtgctgggattacaggtgtgagccactgcacccggcctctagttgttaaagagtgactacatggtgttcccttgtagggatgtgacccataagtgtccttcagccagactcacattggacattaaagtttacatcagttacctattgctgcattaaaaaaacactccaaaactcaggcttgaaataacagccatgcatttgttcatgagtccattgggctggcacagctgggtagttctgctgagcccacctgggttcagccatgcactgcagtcatctgctggctcccttcaccatccctcaattgtggtggtttaacgtcttaacagttggtccttcctacagttgcctctttatcctaaagtagactagactcagtggcttctcatgatggcagaaatattccaaaagagcaagagcctatgctgcaaggtctcttggaaccaaatctcagaacatcacttcaacagttctaccatgtttttttgttgttgttttgagacaaggtcttactctgccactcaggctggagtgcggtggcacagtcttggctcactgcaacctccgccacctgggctcaagcaatcctccgcctcagtctcttgaatagctgagaccacaagtatgtgccgccatgcgtggctaatttttttttttttttttgagacagcgtcttgctctgtctcccaggctggagtgcagtggcacgatgttggctcactgcaacctctgcctcccaggttcaagcgattctcccacctcagcctcctgaatagctgggattacaggtgcgtgccaccacacctggctaatttttgctttttatgtatgtatgtatttatttatttatttattttcgagacagagtcttactctgtcacacaggctggagtgcagtggcgcgatctcggctcactgcaacctctgcttcccaggttcaagcaattctcctgcttcagcctcccgagtagctgggattataggcacatgtcaccatgcccagctaatttttgtattcttaatagagacggggtttcaccatgttggccaggctggtctcgaactcttgacctcgtgatctgcccaccttggcctcccaaggtgctgggattacaggcgtgagcaccgcacccagcactgttatttttcttttcttttttttctttttttttttttgagagggagtctcactctgtcacccaggctggaatgcagtggtgcaatctcggctcactgcagcctctgcctcccaggttcaagcaattctcctgcctcagcctccctagtagctggggctacaggcgcgcaccgccacacctggctaattttttgtatttttagccaagatattggccatgttggccaggatggtcttgatcccgtgacctcgggatccacccgccttggcctccaaaagtgctgggattacaggcatgagccaccacatctagccagttgtttttatatttttaagaaaacatacataaattcattcattcagtggatagatttgagtgtctgtttggtgccatcaaggcttctaaggccctggacatacatagtaccagcaataagagggattaagaacctgtttggagatgggaagtctgaggactcattaaaaaaaaaagagagagagagctttcttacagaactgatagtctagatttgtcaggaaatgaatggaagacctcagggaactcaagagattaaaaaacttacaagctagaatttttaatgagagttcacagaaaaggaagatgaaacagctcttaaatatataaaaggtactcatgtttactcattatacaagatacaaacattgaaaagtcagtaattcttttttttttttaacgccctcctcaacagagtagcagacatcaaagtttgacaccctactgtgtggtcaaggctgtggggaaaagggtgttttcggagagagctggtggagtgtaaactggttgagtctctgtagaggacagtctggcaattctgtcacatgtcttttgttccagcaattctgggtattgaacttttaggtctgccaaccaaatgggggagtggcatttaatttgtttttctgtaattaagagtgagattgaaattttttcatgtttgttggaaatttttgattgctgtatcccttaaaccgacactattgtagatttttctttaaaggagtcttagcttacgattctctcaaatgacttcagtgagggagaagaaattattattcagcagatggtactgggctagttgaatagctatttggaggaaaatcaatttaaatcattacacatcaaaatgaattctaaaagaattgatacttatttaaaatttatatcatgagaaactaacaatagagtattcagtatttttctgatctctgcatggagaaagacttcctatgttttaaaacaaacatcaaggaaagagagacatataaaagtttaaaagctaaataaaattagattaggtgtggacaataggtctaaaatgttctaaattgagtaacactggaccttctcctaactgttctgtagaaggcagcaaagtacagtggttatacccggtgctctggagtccgcctcctgagttcaaactagggttctgctacttggatttttgactttggacaagttatttaagctgtttcatgatttcctcaaccctaaattgagacaattgtagttcccacctcataggataattaaaagagttaaggaattattgttaactttagattcattattaatattattagtatctaaagagcagagacaaatctaagaccacagtgtataaataaatgagcaaaggacaagaacacacagtctacaggaaatactgagatgaggaaaactataggaggagcagtttgggtgacagcagttgagaatttggtttagtctgtgtttaatttaaggcacctgttaggcattagaaacaacctaagtgccaaatgttaatcaaatggctgagtaaattatgagacatctacttaaaggaatattttaaggccgctaaaagtgattttttttacaaagttttgatagtgggggaaaatgctaatgaacagtatttactaagggaaaataaaacagcatttgtcatacataatatgatttcagccttctacaagaaaatgcatagaaaagaattcaacaacatatgtgaaaagataagcagtggttaccattgaatgatggtgcttggggagcaagggaatgtgggtgagtcattcacacagaccagaaggccgggtttggtgggtcaaccgtctgaggtcttttcagttccacagttccacataacaagaacttactggcccaagaaagagctttattggctctgataactgaaaagttcagtcacatgtggattgatgggcacagacactgtgtctagaatctggacttctttatcatccagttttgccttgctctgggctgtctgtcagtcagcctctcttttcatgatgagagtaagacacttgacctgatcactgcagccaggacttaggctgactctcatcacctctttgtgctcagcttggatgccatgcctatccctgagcagtcactgtggccaaggggactcaggtgaatatggcccagtgagtgtcaccattcccacagcacagcccaggagcgtgggcaagcctgagcgctcccctatagcaaacactgttggatggattagaggggcagtggatgctggtgggcacaaccagcaggtgatcccgagagtgagggaagataaggaattctattttctcccccccacccccccccttttttttttcctgaagagacagggttctccctctgttgcccaggctggaaggctggagtgcagtggcacaatcacagctcactgcagcctcgaactcctgggctcgggcaagcaccgtgcctggctaatttaaataaattttgtagagatggggtctcgctatgtttcccagtcctgtcttgaactcctggactcaagggatcctcctgccactaccacacccggaccccccccgccccccgttttttttttttttgttttttgtttttttttttgagatggaatctcactctgtcgcccaggctggagtgcagtggcgagatctcggctcactgcaagctctacctcccaggttcacgccattctcctgcctcagcttctggagtagctgggactacaggcacccaccgctatgcccagctaattttttgtattttttagtagagacggggtttcaccgtgttagccaggatggtcttgatctcctgacctcgtgatctgcctgcctcagcctcccaaagtgctgggattacaggcgtgagccaccactcctggcccccactttttttttttaaattaaaaaacgcaatttctataagaagtctgtctccatttctcagataacctaatgtttgaaaaccttgcagactttattacacatatagatacatacattgattgtaaatggaatcataggctatatattttattacctacacaaacttggatttattgatctacagcttggtcaccctcagctcaatatagctttgggaggtatttaacctgtggtcttttaaatcttgcaagagattgaaaagatagaagaatgagattgtggccgggtgcggtcactcatgcctgtaatcccagcactttgggaggccgaggcaggtggatcacttgagcccaggagttcgacaccagcctgagcatcatggcaaaaccccgtctctgccaaaaatacaaaaataagcctgatgtggtgacacacacctgtaatcccagctactcgggaggctgaagtaggaggatcgcttgaacccaggaggtagagattgcagtgatctgagatcaggccactggattccatcctgggcaacaaagtgagaccctgtctcaaaaaaaaaaaaaagaagaagaagaagaagaagagtgagattgtgagaagttggagaacacaaaccttcagccagtgatggaatagggacaaagaaaagaaactagtgccatgtgatatcacagaagcagaagatggcattttgagaaagtaggcatgcacaacagtgtccatgcagcagagaggtctagcaagatatagattggaaaatgtgggttgattttccaatgaggggcttgttggtgaccatgcaagaggagttgaaacagtgaatggaagtgagaaatttgaaatggaaagtggagacagaaacgactggtccacatgaggggaaggggttgtggaccaggccacaagttggggagaattgactttgagtagagagaggatatctttcttggcagtgtcagtaagggtgtgtgtgaatctggctaggagggaattccgcgaagatcactcttgggtgcctcagttttctctgtagcaccctcaagaagatatgctgagagtaatgagggtcagttagcaagaaggtcatgattcaagccgtgcaagttgggtgaaatctgagagtagaggaggggactgaccaaagctttccagaagctgttgagggccttgatgaggctgaaaatcttgagtttttgtagnacggtagttactgatagtgtgctccttaaacacctgagatccccaggatcctttcagggtgtccacaaggttaaagctgttttaataatcttcttaaagagttactcacactgctctctatgttgccatcagcacttgtggcacaggagcaatgatgagcagagtccccagcaccacaggcaggtcaaggcagtggaactagagaggttactgagctctgcactgccacacccccactgctcaaaaccagtgccagtaaaaagtactcaccatattaaatccatccttaatacatgtcttcacgatgtctgtgtgacaaacacgtatagcatttctgctgcatactgaatgcagtggttttctcagggaaaagcacttatgtaactatttgagctatgagcagaattaactggtttttaaatcgtccctcagttttgatgagtataaagagttctgagatcagaaagtttgagaagcactgtcgcactggcacactttgcacagttcagtcttttctctggccccgcacagaaacatgagttgaggatggaagtgacaggttgcagcattgattcagggtcagagtttcacgaggcaggcaagatagacatgaagaggcactgtggagagccagtcaatggctttccccaggtccaggacagggcaagaaggaaaaaaggatgatggattagaagaaagggttggaatcaggttgttacatactatttgaagttaaagagaagggccaggctggccaggcgcggtgggtcacacctgtaatcccagcactttgggaggccaaggcgggtggatcacgaggccaggagtttgagaacacgctggccaacatggtgaaacccccgtctctactaaaaatacaaaaaattagcctggcgtggtggcaggcacctgtaatcccagctactcgggaggctgaggcaggagaatcgcttgaacccaggaggtggaggttgcagtgagccgagacagcgccactgcactccagcctgggcaacagagtgagactcccgtttcaaaaaaaaaaagacaagggccaggcacagtggctcacacctgtaatctcagcactttgggaggcttaggcaggaggatcacttgagcccaggagttcaagaccagcctgggcaacatagtgactccccatctctacagaaaaattaatttaaaaaaattagctgggtgtggtaacatgtgcctgtagtaccagctactcgagaggctgaggcaggaggattgcttgagcccaggagttcaaggctgcagtaagctatgatcatgccactgcactccagcctgggccatagaacaaaatccaaactctgttttaaaaaacacagaaagagaaaatgtagtattctggaaggcactagggaaagtcaggatttgtggtcaggagtaatactagcctcaaagggacttccagtcttttaggggaaataaaacctgtatccaagtaagcatccacacaggcagccatgattcacaccatctgagtgttaccaatgaatgcccatgtggcgtgggaggagggagtccggacattcttgactgtgggatccgcacctgccagctgcttcccggttctctccttttctccttctgtagctatgaataatgtagaaatagcacttgcagtaacagaaggctggagatctagctacttttcaagtagcaaatctttttttaaaaagctgtcttctttgaaatttatgcctggaggtttaagggcctagaatttatttaactttaaggaactaatggatctgttttagaaatgcttaagctgcaaaacatccagttggcttggagtgcctgtctacttaatacgaacaagtttgagtaggacccttctgcccccagtggtttagaagtaatactgttagaatcttattgtggtccaggccttctggacttttcttagcacagacagtatctaattgggtgaaaagccaaatgacttaatctagtttcaagaaagtccttgagaaaatgtctgtgagttctatgtggggagggctggttgggagcaggaagcaaagtgggatttattacctatattatagaccacaggaatctttttttttttttttttttttttttgagacggagtctcgctctgtcgcccaggctggagtgcagtggcgcaatctcggctcactgcaagctccgcctctcgggttcacgccattctcctgcctcagcctccgaagtagctgggactacaggcgcccaccaccatgcccggctaattttttttgcatttttagtagagacggggtttcaccgttttagccaggatggtctcgatctcctgaccttgtgatccgcccgccttggcctcccaaagtgctgggattacaggcgtgagcccccgtgcccagccaaccacaggaatcttaagattcggcaagggttgtgtgtcttgcacacatatctacaagtgttccttggaagtaggatttgaaccagagattcctgggttcttgaccatcatgcgtctttgtcctgacccttgagagggccacttcctaaacctagccagtttgtgtgcccacagacccagggtcacagctgcaggcatgaccacctcttctactgcgcagacactccttcagtcacagcaaaacctgtctggattctctactctgaaaagttatctaggctataaaacaaaatatcattattccgtaatttcctaaagtgcacttgtatgtattgaaaagattatagatagaaacatacataacttttaaatgttttctatgcggaatttctcattatgtccagcatgtggtttaccatgtttatcatctcctgttgtcttaaggtcaggggttgcaacaagggaggtcaaaattggccggggctgagcacaaatacacacccacagcccttcagtgacctcaggcagcaagatgcctcccacctccccccagcacccaagcaatcccttcggaaggtctactgattgttcttaagggttaggaaacattttcttagtaaatagtgaaaacttactttttgaaagtagtggctagaagtgattccttaaactgatcatgagtattaaattgtaccaaattttacgtgattgtttatcattttaggaatggtgagaagggacatacaattaaattttaaaatgttttaagaagaaataatgatattttatcattctactttgagggcttaatagtatgtgctaatttgcagatggatgaagttgacctttacctacaaataacctaataagaaatgatcattgctggccgggcgcgatggctcacgcctgtaatcccagcactttgggaggctgaggcaggcggatcacgaggtcaggaaatcgagaccatcctggctaacacggtgaaaccccatctctactaaaaatacaaaaaattagccgggtgtggtggcgggcgcctgtagtcccagctactcaggaggctgaggcaggagaatggcatgaacccgggaggcggagcttgcagtgagccgagattgcaccactgcactccagcctgggcgacagagcgagactccgtctcaaaaaaaaaaaaaaaaaaaaaaaaaagaaatgatcattgtcagaaaagacgcttcattaagtagtgccagtgtttttgtttgcggtctgcaattgtcagatggtcggtccctatgttcacagtctcgggaggcttggagatatagtcagcaccctttgtgctggctgctctctctgtagtcatgcttagctcagttgttttgtgggtaagttacttaaacaggaaattgaagtatttctgtgactacttctgctctcactactgcaaaacctttctctttatagctctggacttattggacaaaatgttgacattcaacccacacaagaggattgaagtagaacaggctctggcccacccatatctggagcagtattacgacccgagtgacgaggtaagagctcatgttcctggctgctgcttcagggacatagatcagccagcagtggaccaaccatatcttgcttagattttcctgagatatacctgctgccatacccggttcttccaacaagcccacctttgccttgaggacgagtgctgtggggcacagcttgaaatccctccccccgtaactctgtctatctcagaagacttcctccaggccacctgcaacaggtaggggcggggtaaacgcatgtataaaggggacagctgcaccagtatggagcacagagggcatgggtctgagactggaggccattgtcatggtgtgacaggaagagacacctgaagtgaagtgctggccctgaggatggccggggtggagaggaggtgggcagcctgctgacagggacagcacacagagtggggagggaagtcaacttggacagtttccactgtggcttggcgactccatgtcgggtgtgctattccctagagacaaggacacgagagcctgttgtaagaagtgatgaggccagagtggatatggcagctcttcagagcaggcagggcattcaggtagaagatgctgcatgtcatgttctccccaagacagtcctagtgccttggctctctggtgtctctggggttcaattttaactttattctctggaggataacaaagaaaaatgcaatatgaaccaaaagtttggattgttgtagttgaggctcatatgcacagagaatagtctttaccctcctatttttgaaagaatcagctttcccttccacatccatctctctgcctccagcaacaagttaggcagcttgtgaaatacctacaacatagccagtaacacagaataggagagaatacaggtttggggctcttacaagcttagtgggctggagatttcccaagcttccgagtccaaatcagctggctggggtggtgggtgatgcgtgtaggacacctcctgtgatcccagatgcatagccctccttcgggctgagctatttattcttctggacatgagtccttctcccctttcagatggccaaagcttagtgcagagtttggggtctgtgcttcctccccctaaaggccccatgtgaggattacatgggtgagaggtgagattctaggcattcactgattgacagctggtattatcatcagcttagttctgtaacattgcattagttcacgggcatttaaaaatcaaaatgtggccaggcatggtggctcacacctgtagtcccagctattcagaaggctgaggtggaaagatctcttgagcccaggagatcgaggtttcagtgagctgtgatcacaccactgcactccagcttcggtgacagagcaaaactctttctctaaaaaataataatcagtttgtcactgagtgtgtatggggttctttgatctaaatagacagtttatattttacttaaatagctttctggagtatggttaaaaattaaaatgggggctgggcgcagtggctcacgcctgtaatcccagcactttgggaggccgaggcaggaggatcacttgaggtcaggagttcaagcccagcctggccaacatggggaaaccccgtctctactaaaaatacaaaaatagctgggcgtggtagtacatgtttgtaatcccagctactctggaggctgaggcataagaattgcttgaccccgggaagcagaggttgcagcgagccaagatcatgccagtacacaccagcctaggcaatagaatgagactcagtctcaaaaaaaaaaatggggccaggtatggtggctcacacttgtaatcacagcactttgggaggccaaggttggtggatcacctgaggttaggagttcgagaccagcctggccaacatagtgaaaccctgtctctactaaaaatacaaaaattagccaagtgtggtgccaggcgcctataatcccaggtactccggaggctgaggcaggagaatcgcttgaacccaggaggcagaggttgcagtaagccgggatcgtaccactgcactccagcctgggcaacaaagcgaggttttgtatagaaaaaaaaagagaaaagcaaacttgtaagaaaatacaggagagatttttttcatactacaaatatgtagctttataatcttgttacagttactaacattttggagtatttccttctcagtcttgtatttctgtatctaaattttaaaaataaaatagttttcattctcttgacacaacataggcattttcctattaatcttccttgcagcttaattttgttttcttttttgagatggagtcttgctctgtcaccaggccaggctggagtaccgtggtgtgatctcggctcacttcaacctccacctcccaggttcaagcaattctcctgcctcagcctcccgagtagctgggactacaggcacgcaccaccacacccagctaatttttgtatttttagtagagacggagtttcactgtgttggccaggatggtctcaatatcttgacctcatgatccacctgcctcggtctcccaaagtgctgggattacaggtgtgagccaccgtgcctggccagttttttttatttttctttgagatggaatcttgctctgttgcctcggccagagtgccgtggcgcaatctcggctcactgcaacctccgcctcctggattcaagcaattctccttcctcagcctcccgagtagctgggacgacgggggcctgccaccatgcctagctaatttttgtgtatttttagtagagatggagtttcactatgttggtcaggctggtctcatgatcctcccaccttggcctcccaacgtgctgggattacagatgtgagccactgcgcctggccttgcagcttaatttttaacagctctaagatgttttttcatacaaagataccatgatttatttaatgaaatgcatgtattttagtattatgggtgttgattggataaacgtaccaccaccccaacagcagcacatttctcttatttcgacattcactgccttaaaacatttaaaaattattctgggatttgtggtaagttcagaaaaacacttgaaacagattcagttgctcccaggctaagtgtttatgagaacttgaggagtgtgggcacaactctcagtctctctctgtcacccagactggagtgcagtggcacgatctcagctcactgcaacctctgcctcctgggttcaagcgattctcctgcctcagcctcctgagtagctgagattataggcgtgcaccaccacactcggctaattttttgtatttttggtagagatggggtttcaccatgttgggccaggctggtctcgaactcctgacctcaagtgatccgcctgcctcagcctcccaaaatgctgggattacaggtgtgagccaccgcgcccggccatcaactcttaagtttttatgagacatcagtcctgttgtaaattcagaatctgagcagtggtcattttatgaatcagtaaattactgccttacccataacaactttgactgttaaatgttttgttttcttttaaagcccatcgccgaagcaccattcaagttcgacatggaattggatgacttgcctaaggaaaagctcaaagaactaatttttgaagagactgctagattccagccaggatacagatcttaaatttgtcaggtacctggagtttaatacagtgagctctagcaagggaggcgctgccttttgtttctagaatattatgttcctcaaggtccattattttgtattcttttccaagctccttattggaaggtatttttttaaatttagaattaaaaattatttagaaagttacatatattctcctaggaatctctctctcgtttattagaaactccaagtacctcctttactctcaagggtagtgaatgtgattatttggaaacaactttttcatattccagattgttcatctttgggttctcatcctttccttgctgcctgtccagagcagtttcacagttacatgagcatctctctggaaagggttcgcctcaggactccctcccatggaaagcagagccaccagttaaataaatttagtattagagtcctctgtgcctgccccttcagaaactcctagctgggacctggttctacagttgatgtcacatgcaaggggcccagaccctgttaccagttcagactagcagtgtaggctggagagctggagaaacttcatccaggagatggaggctgggctggccagtcagggggatttacatgggcctgcacagaagctacatgtgcttagatcataagggaaggtgaacaatgtgacaatattggtagattttaaaaattgagcaggcccaacacaatggctcatgcctataatcccagcactttgagaggctgaggggagaggatcgcttgaatctcagagtccaaggctgcaatgagctatgattgtatcactgcactccatcctgggtgaaccctgtgtcagaaaagaaaagtatacaggaaaagaatgcaaatcttgattttagagagtatgtgacaagaggagagagaactggacttgtgtttagaactctatagaaagaagcagtgaataaagaattgtgggccaggtgcggtggctcacacctgtaatcccagcactttgggaggccgaggcaggtggatcacgaggtcaggagatcgagaccacggtgaaaccccgtctctactaaaaatacaaaaaattagctgggcacagtggcaggcgcctgtagtcccagctactcgggaggctgaggcaggagaatggcgtgaacccgggaggcggagcttgcagcaagccgagattgcgccactgcactccagcctgggcgacagagcaagactccgtctcaaaaaaaaaaaaaaaaaaaaagaattgtgagccaaggtagaagcagttgctggggagatgctttggacagaaccgtgttgcagttagaggcgtccattccccgtcagtaagaacaaagaaccaagtagacntgagctgaggactgacatgaccaactcagcctccaagcagatagccctgaaagccaggcagggcaacagaacgaggaattggtagggaatagacactagtagtttgggggccggaaaatggtgttttcaaaagtctgacatcaaagcaggaggggttgaaatgagggaatactgggtaggagatcagctaagaacaaatgcctggtcttccataccaaaggggccgtagccttggactagaaatgaagtggtgagaagcggcaaattcaagaggaggaggaaaggcaaagtcttaaagactccaagttttctaaacctaccaacttgggggaggcagggctgctggcactgttaagccctcacttagcctgctgttaacaccagacgcaccccaaaagacgatctctcaaacccaagggaagtgttgtggagtcacgcgaacaggacgtgcagtggactgctagccataagccttgcggagtgactgagaaagaagcctgttatcagcaggggctgagctggttcatgtcttctgttgccccatacacatgtggctctctagtggaggaggtgttagccacagtgatttgcacaatcactcactgacagaaagctgggccccaggatccaaccattttcacacctgcagtccccacagaacttccttcctggctcctctgtgaggtgctcacagtggagcaattgtctctgtttctcaagagtccgtccctctccctccgtgaggctccaggacacactcccagtgtctgtacaaggtcaggttaactagaccttggtcagcccgctgcctttcctctacagcagcggcgtggggtagtcataacagacctggatggcctgtgaggcctgcccttctgtgaagagcactctcttgccgtttacagaacctagaatattgagctgagcaacttctgttgcttttcttccttcacagttcctttcacagtcattttccctcagccaggtggtggcttgtgagcatctcatctctgtcgcttcaggtcaggcggcagtgctgcctgcttagtctgcattagacactaacagcaaacgcggcaagcaggacctaaacacagcctcagaggggcccatgtagtaggggagaaagacacacacacacacaactgtgcacatttttagtataaaagagcttctggggttgacgtgataatttgtttttcatcatttaatcagcattgagcacttcctttcgccagttaggaaaggaacaaagatgaataaaacccaggttttgctttccagcagcctcatagcaggaaatgtaaacaacaaggagtatacagagtcccagagatggacacaggcatggtgggtcccagagagtaaggcagacattaaagcctcacagagtgtggccgactcgcggcagttgtgctgcagctgaaacctgacagttgggttctttgctggttggggaggggcacagctgtgtggaccctggaaggcgggcatgccagacagctgggcaagaggggggctgcagagaaagaggccagcccaggctgtggcccttgcttccccaggaggccagctctccctcacaggtagctgcctgacctgaagcagtggctcaggtgactctggtggcagtaaggatgcaggaggacctctgagagcagggacttgggggaaaactggtcaggccactgaagagacaggcagcaccgcaggcacaaggatggcaagacagaggcagggttgctcctgaggccacagggcgcagttgctggcagaacgcctcctgaagccagctttgcaaggcgggggaccagtatccctctcaggtccaccaccactctgagagtcccggcgtggcaaggacagtcacctctgtgcgttgttcatttgctccagacacagaagacacacagatgctccctatgtgcttatagcatgattttttttcccaacattcttttagtgacagttttcaactattctgaaaagttgaaggaatttaaagtagacacccatattcccaccacctagattatacagttaacattaacatcttacttgttttctcatagatctgtccatctgttcctctatccacccatcaacccatcgcattttatccattcattgcaaaggacgttgccaacgtctagactgacttacaatttagtcatctagaatatcacatgaatccaggggaagctggggctgggttggctgattaaactatgggataggttctttcataaacatttcattttggtgatcacaacagaattttgggaagtcagcatgcatccatgtttataattgaggaaactgaagacaggagcctttgagcacttcgctcaaaattgtacatcaagtggcaaaactaggcagagaatccaggtattttggacccagaatgtcattttcttgaaatgtttgccagcatgaaacagtggcaggctgcacactgcctgtgattagccttgctccttgggaaagttctcaggactcattcacaatactaaggagcattgtctctgagttcccagcccacacactggagatcaggagctctgaattggagagctcaggaggtaaaggtgtaataaaacatgggaacactgggagggcacggttgaccgtttggctgcagcaagaaaggcttagaaacatacaccccaggaccacagagcacagctgtggggcccctttggtagaggaagcaatgaagtgatatttgtagtggtggccgaaaggtcttaaaaaagggtcaaattatattcattgtattttgcttaagggggtcagttttagaaatgtttccatgggcaagtttaaaagctgatcatgcctactacctgtgacaagcctcattcctacccagcccatgtcctcagtctcctaccctgtgaggcgggtgaaggtagaggtcagtgctcaacttccttcttcatctgcctgattgtgaattttctcaggtggattgatcactaggggcatgaaccgcatttccctttggtttattgaagatgaaagcattttagggcagctttaatttcctgccaacccgtaggtttggctgcagttcacctctacataaaagagaccacttctccctcttagcccatctccaagtccacagtttggctatagttagcccattcttcttgccccacctcctgagtggcagatggaaaccacagctctgaaagtgctctgtgaaatagtaagtgatactctgctagattttcatgcactagtgttggatatcttacggtaaataaaggacatcttaggaacactgcagtcagcgtaggctgggggagtggcgtctttcctatgagtgttgtggaaaccacctcagaactgtctgagaggaggtgcctgtggagtgagggctgaccctggccccttcagaactgccatgtgttatccttgcccaaatgtgtccaaagaaatggccattttgcaggagtcttttttcccttttctgttttcataatgctattgctgctgctgctgttttaatgtggttcactgttgtcacttttgtgttttgtgatgctgatgatgatgctgttttcacatggctcactcttaactcagtggtctgtttgtgtttctataggacaagggctcagaggactggacgtgctcagacatcggtgttcttcttcccagttcttgacccctggtcctgtctccagcccgtcttggcttatccactttgactcctttgagccgtttggaggggcggtttctggtagttgtggcttttatgctttcaaagaatttcttcagtccagagaattcctcctggcagccctgtgtgtgtcacccattggtgacctgcggcagtatgtacttcagtgcacctactgcttactgttgctttagtcactaattgctttctggtttgaaagatgcagtggttcctccctctcctgaatccttttctacatgatgccctgctgaccatgcagccgcaccagagagagattcttccccaattggctctagtcactggcatctcactttatgatagggaaggctactacctagggcactttaagtcagtgacagccccttatttgcacttcaccttttgaccataactgtttccccagagcaggagcttgtggaaataccttggctgatgttgcagcctgcagcaagtgcttccgtctccggaatccttggggagcacttgtccacgtcttttctcatatcatggtagtcactaacatatataaggtatgtgctattggcccagcttttagaaaatgcagtcatttttctaaataaaaaggaagtactgcacccagcagtgtcactctgtagttactgtggtcacttgtaccatatagaggtgtaacacttgtcaagaagcgttatgtgcagtacttaatgtttgtaagacttacaaaaaaagatttaaagtggcagcttcactcgacatttggtgagagaagtacaaaggttgcagtgctgagctgtgggcggtttctggggatgtcccagggtggaactccacatgctggtgcatatacgcccttgagctacttcaaatgtgggtgtttcagtaaccacgttccatgcctgaggatttagcagagaggaacactgcgtctttaaatgagaaagtatacaattctttttccttctacagcatgtcagcatctcaagttcatttttcaacctacagtataacaatttgtaataaagcctccaggagctcatgacgtgaagcactgttctgtcctcaagtactcaaatatttctgatactgctgagtcagactgtcagaaaaagctagcactaactcgtgtttggagctctatccatattttactgatctctttaagtatttgttcctgccactgtgtactgtggagttgactcggtgttctgtcccagtgcggtgcctcctcttgacttccccactgctctctgtggtgagaaatttgccttgttcaataattactgtaccctcgcatgactgttacagctttctgtgcagagatgactgtccaagtgccacatgcctacgattgaaatgaaaactctattgttacctctgagttgtgttccacggaaaatgctatccagcagatcatttaggaaaaataattctatttttagcttttcatttctcagctgtccttttttcttgtttgatttttgacagcaatggagaatgggttatataaagactgcctgctaatatgaacagaaatgcatttgtaattcatgaaaataaatgtacatcttctatcttcacattcatgttaagattcagtgttgctttcctctggatcagcgtgtctgaatggacagtcaggttcaggttgtgctgaacacagaaatgctcacaggcctcactttgccgcccaggcactggcccagcacttggatttacataagatgagttagaaaggtacttctgtagggtcctttttacctctgctcggcagagaatcgatgctgtcatgttcctttattcacaatcttaggtctcaaatattctgtcaaaccctaacaaagaagccccgacatctcaggttggattccctggttctctctaaagagggcctgcccttgtgccccagaggtgctgctgggcacagccaagagttgggaagggccgccccacagtacgcagtcctcaccacccagcccagggtgctcacgctcaccactcctgtggctgaggaaggatagctggctcatcctcggaaaacagacccacatctctattcttgccctgaaatacgcgcttttcacttgcgtgctcagagctgccgtctgaaggtccacacagcattgacgggacacagaaatgtgactgttaccggataacactgattagtcagttttcatttataaaaaagcattgacagttttattactcttgtttctttttaaatggaaagttactattataaggttaatttggagtcctcttctaaatagaaaaccatatccttggctactaacatctggagactgtgagctccttcccattccccttcctggtactgtggagtcagattggcatgaaaccactaacttcattctagaatcattgtagccataagttgtgtgctttttattaatcatgccaaacataatgtaactgggcagagaatggtcctaaccaaggtacctatgaaaagcgctagctatcatgtgtagtagatgcatcattttggctcttcttacatttgtaaaaatgtacagattaggtcatcttaattcatattagtgacacggaacagcacctccactatttgtatgttcaaataagctttcagactaatagcttttttggtgtctaaaatgtaagcaaaaaattcctgctgaaacattccagtcctttcatttagtataaaagaaatactgaacaagccagtgggatggaattgaaagaactaatcatgaggactctgtcctgacacaggtcctcaaagctagcagagatacgcagacattgtggcatctgggtagaagaatactgtattgtgtgtgcagtgcacagtgtgtggtgtgtgcacactcattccttctgctcttgggcacaggcagtgggtgtagaggtaaccagtagctttgagaagctacatgtagctcaccagtggttttctctaaggaatcacaaaagtaaactacccaaccacatgccacgtaatatttcagccattcagaggaaactgttttctctttatttgcttatatgttaatatggtttttaaattggtaacttttatatagtatggtaacagtatgttaatacacacatacatacgcacacatgctttgggtccttccataatacttttatatttgtaaatcaatgttttggagcaatcccaagtttaagggaaatatttttgtaaatgtaatggttttgaaaatctgagcaatccttttgcttatacatttttaaagcatttgtgctttaaaattgttatgctggtgtttgaaacatgatactcctgtggtgcagatgagaagctataacagtgaatatgtggtttctcttacgtcatccaccttgacatgatgggtcagaaacaaatggaaatccagagcaagtcctccagggttgcaccaggtttacctaaagcttgttgccttttcttgtgctgtttatgcgtgtagagcactcaagaaagttctgaaactgctttgtatctgctttgtactgttggtgccttcttggtattgtaccccaaaattctgcatagattatttagtataatggtaagttaaaaaatgttaaaggaagattttattaagaatctgaatgtttattcattatattgttacaatttaacattaacatttatttgtggtatttgtgatttggttaatctgtataaaaattgtaagtagaaaggtttatatttcatcttaattcttttgatgttgtaaacgtactttttaaaagatggattatttgaatgtttatggcacctgacttgtaaaaaaaaaaaactacaaaaaaatccttagaatcattaaattgtgtccctgtattaccaaaataacacagcaccgtgcatgtatagtttaattgcagtttcatctgtgaaaacgtgaaattgtctagtccttcgttatgttccccagatgtcttccagatttgctctgcatgtggtaacttgtgttagggctgtgagctgttcctcgagttgaatggggatgtcagtgctcctagggttctccaggtggttcttcagaccttcacctgtgggggggggggtaggcggtgcccacgcccatctcctcatcctcctgaacttctgcaaccccactgctgggcagacatcctgggcaaccccttttttcagagcaagaagtcataaagataggatttcttggacatttggttcttatcaatattgggcattatgtaatgacttatttacaaaacaaagatactggaaaatgttttggatgtggtgttatggaaagagcacaggccttggacccatccagctgggttcagaactaccccctgcttataactgcggctggctgtgggccagtcattctgcgtctctgctttcttcctctgcttcagactgtcagctgtaaagtggaagcaatattacttgccttgtatatggtaaagattataaaaatacatttcaactgttcagcatagtacttcaaagcaagtactcagtaaatagcaagtctttttaaatgctgctttatttcactaaattttgttgtgaggtgtcactaaaatgcctgcaaacaaacgtaactgctaatctgagaggaaaccctcttactaatcagagaagaaaccctcctgtcagaaaccttcagggaagtgagctgatcacacctaaactgggagtttgcaatggggtatttgaagcactgtgggagtattccactggccctctccctgagagacttaacagtcttccctgttgtccagattctgtataaggcaatcagaataatcatcttccttgttcagcagaggagcctggtcccattttccccactttgtgatgggcttctctcagcggtagctcagcagttccagatggcagtttggaccagcatctaggctggccagttcgctgtgtttacttagaaccaacacgttcagagctggcctggaccatctgaggggaacaggaaacacccctaggctgtggaagcaagtgcagacccccacccccggccctgaagccaagggggcagggtttgggagtggccaaagagaagcagtgcagggatgggttttcctagggacaggcttagcattcctgactctaggaagaaggagcagtgaggcggagaaacagtggaggggatggtggcattgggccccatggggccgagatggacacagggctcgttctcttgagtctggtgccaaggacagctgaagacgacatcattttcaggtggagaggagagagtggagggagatcatgccctgtgatgtgtcttttgcaggtgaaggtgggagacaaggtctctgctgacgatgaggcagagccaccgtgaaagttgtaataggaggactgcccgccgctggaagggcctgcagtgacgctaggacaccctctgcctgcatgtcacgttagctgggctgggcgaagtagaagaccaaggggaagaggtgcagtggggagaccaggtgggatgcaaccacaggaccagtggaggggctgtggcacgtgggcggagactgagtggctgggcatgtgttgtggctgagcatgtggtgtgggcagtggtcctagaccccgccatgtccggacaatgatatagagcgtctcagcatcgccagtctagactgtctatggagagcagaaagttgtctggggctgcctggggaactgtgaggccagctatatcaccgtcgctgatggtgacattacggtggtggcaggagcaaggagagagggaagaaggaccccgtccagctttagtcacaaaatacccaatggaagatgccagtgccaatcctgtgggtttccttgggacttcacactggctttcttatctgctccagatccattcagtagtcactgagttcctgccaaatactttgtagcgccagaagccaggagcggggtctgcagcagggcagtccccattttcaggaaatgcctggagctgctggtccctgagagaaaggaaaacatctttcagccgtacgcaggccaagaaggccaatgtccagtagctttgtgattttttttatatttttttatttatttatttttgagatagagtcttgctctgtcgctcaggctggagtgcagtggcgtgatctccactcactgcaacttccgcctcctggggtcaagcagttctgcctcagcctcccgagtagctgggattacaggcacacgccaccacacccagctaatttttgtgtttttagtagagacggtttcaccatgtcggccaggctggtctcaaactcctgacctcagatgattcagcctcccaaagtgctgggattacaggtgtgagccactgcacccagcctgtgatgtttctgtggggttccacaaatgtgtgtgtgtgtaaaagctgatgattacagcaagaatgtgaacagtagcagttttccatttgaaggcaagttttgtctttatctgggtatcagaaggaccctctgggccattgtcgcttcctgtactcagagccaccctagtactacgggcacacacagaaaacagcagcctgcgtactttcaaaggaaaggcatctttaatcaccaatgcctggaaaaattattttgtttccctcttccttccgtcttgtttcctaacttcttaccaaagtttagagtctgagtttttcgtataataatgtcccacatccacacatcgggcctacagatgctctcccttgaatcgactggaaacatgacaccggttccatgctctggaactgtcacctgtgatgtgctgggctgtgtcccaagcacaggaatcccagcagtttcagctcgatgcagaaccaccatgctccagacacaggcttgggaaagacacgtcaaaattaaaatactaggtaagagaagcacctgattgggtagaagttggagaggaatcctggaattttgtggccagaaggagccactgccccttttgtttagtaagactagacagtaacagaagccagttgtcagctatgaaagtggtgggtgaagcaggggaggctcctctatggtgggaccctggacaagggaagccgaatgtgtgaagaaggggtgcgggggtgtgcggtgccctaggacactagggcaaaggtttcaaacctggaacaaggcactggaggaagatctgctgccagtcagcagngcgggccctcgagttagcagtccgtgcgcagaggggccagttctgagaccagtttggagagtcaggcagtgacccattggccatgtcataattccttcagcctgcctcctctttaatcccagagagtgctctttcttcatacttcctttaaaatactaaattgttcccattccatggggagctggctaggctttacaggctaggaaatgtaggttttctgagatggaaccatctacacaaggaggaggaaggcactaagactacagatgagacccatgacagggctgagcatttggaagccaaccctggttgcttttcaagaattgctttgtggctgggtgcagtggttcacacctgtaattgcagcactttgggaggctgaggcaggtggattgcttgaacccaggagttcgagaccagcctgggcaacatatgggacaccccaccgcccccggctctgcaaaaaaattaaaaattagccaggcgtggtgtcatgagcctgtggtctcaactactcaggaggctgaggctggaggatcgcttgaacctgggaggtcaaggctccagtgaaccataattgtgccactgcactgcagcctgggcgacaatttgttttctaaattgcttttgaaagtctactgcattacatattccaaaaagcagtggttttcaaatactttnatcaccgatatccttttatgaaatgaaatcagtagaactttctctgctctgaataagcaagggtgggaacctgtctacctcccacagatagcataatgtgcctgccatagaggagccaaaaaatggtgatgggaactgagaggagagcaaatgtcacaaaagactgagcaattgagaaaacaaaacaagaccacagatgactgttaacgcctccacagtggaccaagaaaggacagagagctggcagcatgggcatcactgtctggtcggcagcaggaaggcctcgctagggaattgagtacagtcatctaactagtttaaaagtacaggaaggatgattaaggctattggagaggtcatacaaataggggaggggcaggcaatggctgataagacatgaatttgtaaggcgatgagtattgcagtcagcaaaacaaacgagactgctctcccaacacataactcagcagggaggccaggcattggtttaaccatttaatataaagaagttaaaattacaaatgcgctaagtgcctaaagaagaataagtgcaggaatgagagcagcatggactgccacagttttagaataagcactgtcactgctagattggaaacaaaaatccataaatttggcccggtgtggtggcggacgcctgtagtcccagctacttggagg

SEQ ID NO: 12 - DNA, 15353 bp, Homo sapiens
  modified_base (1001)..(1001): n is t or c
  modified_base (1080)..(1080): n is g or a
  modified_base (1615)..(1615): n is t or a
  modified_base (2307)..(2307): n is t or a
  modified_base (3314)..(3314): n is g or t
  modified_base (4924)..(4924): n is a or g
  modified_base (6939)..(6939): n is t or c
  modified_base (14354)..(14354): n is t or a
gagaaagtctaataccaagcttgagattttggggagcgggagtcaggggcaagacgaccaagtagagatgtttgtcacagatgatgagagctgttgtggtggcattcatacttattctttttgccagctatttttattttgtctcttcaaaagaatatatgaagggaatagtaataataattattaaaaacagtaatagtaacagtggcaaagctcctttcattatatcatatagtaaaaacataatgttatggttttgtaatataacattacacttttttttgaatgtctaaagggtatctgaaagtataaggcatgcagaaaaagatttggctatttactaaattttaagatcctacttgtctagagccttattgtgacagagtttttaaaaatgccccgaaatatgcagcccatgtaacaaaatgagaactttactgaaaggcattcacatttcaaatcaagatcaagagaaaatccacaaatagtattgtgtgttttctgcacaaaggagatcattgaattgtctgtgcacttgtatactcacatttttaactaaattaatcatcactttttttctgctagttaatgctctccaaaagtcagatgaataaaatgattgtactgactatttgattgtgctgattaagtcaaaactctttaccaactatatttcattggctttaaaatgtgggcttaaaaagcattttaatattttaatattcatttgctattgatggtatgccattgctttactgaaagcatttttttcttggtggtccataaaataaaattgtgctttacattcttgggcgtcaaagatccaaagaaatgcagcaggtaagtcacagaaagaaggaaaatcctgacacaaaatcaattcatagaatatgaactgattcactgacgtgcttcatcatagttctacccccatggaattacccccttatcaatgtcatatacatttcagttttctcgtgtagtattaatgcctattaagnttcttctgagtgacaattcatggtaatttacctgtatcaaggcctgatagcatttcagaaactttaactcttgtagcanaaattcctcagaagactagtaattagtgtgtttcaattccagtagcaagcatactgtcacacttttatttaagcagttactgaatcatggaatttaaaggctgagccaggccataagtttgttccattgtttagaatacaaaacttagatttacagaaatttaatgagtagatcctatccctcagtttatatcacagagcaagactgttgttcaagagagcatgagattaggtcattaacataattccccttggtttataggtcaggctgttatgaaactacagaaagaaatacacagaaataaagaaaaaattctccctagcaaagatgaagttttatctagtttgaatcccagataggaaagtaggcagctgattattcactgaagagtagaaaaatatatgatcttaaaattggaatgaggaaactctttaataagtattttctaagaaattcaaactactttgcatattttaaatcttctataagattacattattggagaattttatgttgtgtttggccattggaccangtctaatttctctatttttcacattggaaagaatcctagtaaatggtattcctaaagaattatataattttgctgttgagcatttctttttttttttttttttttttccaaaacagagtcttgctctgttgcccaggctggagtgcagtcgtgcgatctcggctcactgcaacctctgcctcttgggttcaagcagttctcctgcctcagcctcctgagtagctgggattacagatgcgcaccaccacacctggctaatttttgtatttttagtagagacggggtttcactatgttggccagcctggtctcgaactcctgacctcatgatccacctgcctaggcctccaaaagtgctgggattacaggcgtgagccaccgcccccagccactgttgagtatttcagaacttctctttgtatcataaagttgtcatagaaaagagtccttgagaccaatgatctttcaaagattggtatctgacattaataactcaagaatgcagtttcacaaattttccttagggagaacacttcataaaaattgagttaataaaatgataaaatacaatggccataatagttcagaactctggcagacatgcctttattagtattcttgggaaatagagaaagcatagtacctgagtccaaattatattctcaagtccaaaatatttgctgacataataanagtttctacataaaaatatattcttagtagagaattaaattacttcatttgtaattcttatagcaggctaaagatagccaatttgatgatcaaaaccatggggaaaacttccttctaagaacagaatgtgacttaaggcaatagagtagacagaggatgcatagaaacctgaatgaatattagttattcttccctgaaagagttgaaattcctaaattgtgccttggtaaaaattattgtgccttggttaaaaaaaaaagtatgtgtgtgtatatgtgtgtgtgtgtataaatgaatctgttgtcattttactctgcttaaccattagagatttttatatgtatgcttatatctgttgttatacactaatagtacaatcattacataatcatgacattttaattcttaattacaatgcctttccaactatataaaaatatgtctagtgacacatattttggaaagctttcttggaaaaacatccagagattgtgttcatcactatctatataaatgagcttatactgaaccttaaatatgtttattcagcctaacaatcagaaaaagaaaacgttttttaacagtataaagttcagatgagtccacttgtcttggaattttattttgattttaattagaagaaagactgccattagaattgttttctaatgaaatctttataaattctctgggcagtgccctgtatctttattagaaagacttcttatttttaacaattttatttggaagaagttctactcatttgcatcagttcatcgtctacataatttgtgtgtgtgtgtgtgtatgtgtgtgtttacaactttgacttttgaaactagaatagaatcaggtaaaacatctaagatcagtgtgccagtaattggcctgaatcatcgggcaccatgatgggtttggccgccttcaacgtactcggtgtacattctatttttttcttcataatgttcagtactgtagtactaatcaccgagaaaattgcattgacncttttcgaccaccagggaaatattcagctcatggttctcccctaaaaaaactaaaaagcagctaagcgctgggaacaaatctgacttaatgcattttctcagtgggccaaagaaaggagggccgattgactgctttgactttttaaaggtcttctctttgttcacttataaagtgaggaaaacaaattctcggcactggcgtgagagttatttgagcgtcacaaaagaaagcaaaagaaaatattagtgccattattgtggcgaatttcatgtttcccagcgagccctttgattcctggtttgggctggcgctcgagctctccagccgggtatgacttcggccacaagatggcactgacctgcaaacaaagaaaagcacagtggcaccgactttttcaagcctcgggaaactgccctgccttccccggagtcgaggactgtggggattagggcttcctttcccctgcgcgggaggtctgtgtcgaataatgtgtggcttctgttggattgcttttctttccaaaattcctaggcaatgcttccccgaggtgtgcacctttgtgaggtgtttgtggggttgggggagcttcaggcgctactcgcgggacgccgtcacgtgatccgggatgaggtggagttcggctttaaggaggcgtctcttcctagcttcatcaatctttaggatctgagcaggagaaataccagcggatcttccccactctgctcccttccattcccacccttccttctttaataagcaggagcgaaaaagacaaattccaaagagggtaagttgcgagtttatgcctttccagagacttctgcgaaatctctcattgacaaggtgaaggatgagaggggaagaaaaacgatgcgagtgtccgaaactggctctgggggaccaaggtggggtctccagtgcaggcaggtcgcaggttgctccaaatcaccggaccgttcgcgggctcctgccgaagggtatggggacgacgcgggtgaaaggagagggtaccctacgcggagttcgggctttcccaccacctgctcccggggaatttctggatggggatccaagttttcctttaccccggttctctttaaaaggccgaggcactgggaaggcgcccgagttcgcctatcccacacccgctcattttccttacgtgtcttgagctggctggaggcgctggctctggccgcaccggagttttcgcggagtaactggctgggatgagccggagaagggtgggcttggcgcgtcgcccagcgtcgcacgggtcccgcggcaggtgtcgggctgggagctggcggaggtgggagtagccctcggcgcggaccccagcgcgcaagcccacccccacttgcgggttccgcgcttctcggctgcaatcgagccgcgctccgcagtaccgggcgcttcgagtgtggcgctgcgccccgatagacacccgaagcttttaatcatcggagttctaatcagggaactctttagctctttcttttagaaaagtaatgatggaacgtggctgggttaggagattgggaatggacaggaggtggaggtgtcttgatagggtgtgccattggttcccaggtagactggagagatnagaatgttttaaggtctgatgttgggccaaagagagagaattgacttcggtttgggatctgcttggttttggttgtttatatcttttctcttttgccagtctcttatcactggtagaaaggttttttgatgagagagagagagagagtgagagtgtgtgtatgtgtgtgtagtagggagtcaggaatggagtaaatttcgggcgattcacctagttacgcaatatgaaaaaggtgggtgggtaagcgtgccaacaggaattttgactgaacatgtcccatttcccatttcgttgtttgataacttctggagcacaggaaaaacctaggggagaggagcaaaagagagtgtgtttccatgtacacacactcacactcacacacacacagagcacgcattgcttcccccactccccatcctatgagaaagcatgacgggcgggatggcacacacaggcaggggacatgtggagcttgtctgtcaggtctggaacagaaaagcagtagctgtttgttctcgaccctgggccggctctctggcgaagcaagcgagggagcagaaagctaacccgaccaggttccccacccaggactagaccgagtgctcttccgtgactactactttattagtctttattgtcttaaggcagcagtctgttgaacaagccctccccagcaaggaaggagcagagaattatgtaattcatttagataagctagcagtaactttgggaggctgtatgtaacaaggctgacatttcttttccaacacaagtgaggtgaacagccagccaatcctgagtatttgaaaaaatgtatctgcagcaggttatgatcagggagctgtattttcaagtagtaacagcactgcgaagagcaagcaatgaaaggccagcattctaattggaaagaaagaagaggaaatttccctctgcaagggggctaatttgccaactggtgatgtatgtaatgtctgttttgtctctatatgcacatggcagctacactgagatttaacagtctttaatttttgcagtttctgcagttgcatagcttattttacaaattatattagaatagtaaatatcaaattattttcttttgcaaagataaagtgtgtaaattctctcttagtattgttattttctgacagttattctttcttgaaattacactaaggtaaactgaaaatacacatttatccaatgcagaattggtttacacaactggaataactatcaaatgtgcacttagtaaaataggcttgaaaacaccttaaaaaaataaacttttcattttctctatagctaaattaacttctacctagtaagaaaaatgcttcctcattgggcatgcctattaaatacaatttcaaaggtatcaggctagagcttcagtacgtttacctgaactcatctgtaagaaagctatgtttgtagcctgtactttgcaataatttaatgtctgtgtgaattcttatatgtattcatttttgccaaaatcagtcagtggatagaatatttctgtttctttttctccatggtatacatcttggtctctgtccctattatttctcgccaaaattattgcactagctttctaatgaatctccccatttcttctctttccttgagtgtgttgaaaacagcagcgagaatagtaattttaaatcaaaagtcataaaacttcacacctttgccaaagactctccagaggctccccagctctctcaggattataggcacagaccataaaaaaaaaaggctctacagtctgtacccccctctttagccttcctaattaatttcctaagagtccctcccttatttatcctacttcttattgctacttagcacaccagttacacatgggccttagggatttttgttctttccatatgggatgcaatccctgagatacttgcatagcttccctactcaccactcctctcaggtcttaacttacatgccttcttctcagacagtcagaggccatcttttacagtcaagtaataaantgcagctcccccaaatcccagtttctctttctttttttttttttgagacggagtcttgctctgtcacccaggctggagtgcggtggcctgaacttggctcactgcaacctctgcctcccaggttcaagcaattctcctgccacagcctcccgagtagctgggactacaggtgtgctccactccgcctggctgatttttgtatttttagtagagacaaggtttcaccatgttggccaggctgatctcaaactcttgacttcaggtgatccgcctcggcctcccgaaatgctgggattacaggtgtgagccacctcgcccggccccagtccctctttcttgctttgttttacttcataatatgtattatcatctagcatactatatcttttactaatttttttcttgtctttctctgcccacaagactagaaacacagtgagaaggtcacattatctccagtaaaaccatgcctaacacaaaataaatgtttaattaatatttgttgaatgaataaattttctttcagaaataatatttttatataaagtgtaacattttcccctatatacatgacctaggagtacggctgttgtgattagcatacattttgcctgttcaaggactatgatggaattgagctattgatgttaggattaatttacccaagaacctactattccaaccatgcatcagttatatcagtcaacacagttttattctaagtctaatacttgcaaggtactatgaagtatgcacaatgcctacctcaaagatgttatattaaaaatgagaggagccaactaaggattctagggactaaatggtgctttgaaagatgggtagagtttggattggtggtgggagagagagaacacccagcaagaggaatggcggaggtggagacgcagagctatatttggtagactgtgaacagactcacctgcctagagcagtgtattcacattgggattattagagtaaagtgtggacaagaggtataatgcagaggtcttaatgtgtcaggctggggaatgtacttagtattctgtctctcatgtgtctcaaaccagggtcctcattcacctgttggtacttggtgacaaggataaaaagcttttccctactctgctagttttacttcaaataatgaagggaaacttataattaattgataagtcatgttaaatatctctgtagcaacttaaataggaaatatgatgctaaattttcttgaattcttaaaataagagatttccaaataatttgaagttattactgctcttttgagattgttttcaaactctgacaatcgctgatcattctctctgcctttggaattcttgagagacaaagtgtggttatcacataagtattagggagtcattacaggttgatgcatagaggaagagagagccacgtttctaataacactcatacctgaaatcattccattaccattctttaatagtttcattctgacttcattgtagcaactcttactttattcttcttaagtttttaaggccaaatcatggtttcataataaaaaaaaaaaaactcatgttctagaaagcacaaaaattaaaggaaaggtttattagaggcattaagtaaaaggcaaatgcatttcttgttcattaagttttttatctttctttcaatggaagtaactctgcatgattttctttattggtcttatttaagaaagaaaagaatgaaattcagtttcttaatacaagcatgatggcctgttaattaacataagaaactccgtctcacatatttacttagtaatctagggaatatcagacttatttttgaaaaggagtttttaaaataatttcaaactttttaaaactctacaagtctgtgatttgtgttgttaataagagaaaaatgtatcacaaagtgctgtgaaaaatcaaaattacaattaaaatctagatccttgcattgggcacacatatagtctggtgggtagggaagatatttacataaataataccttagaaatccttgaaagcttctaacatattaataaaataacagactcttaaagttagaatctcccacacaatatagaaactctctgaaatggtttttcatatggtggttataaaatttgtatatggaacacttgctagatttgcaggcaaataattccattttactaaacttttgttcctcacaatgatgtgattaaaaaaataatgtgcacctcttggtcctacttttaacttgtacatataattagatgtaacattctaagctcaacgctgtgttctacatgctacccattaaaatacaagaagacatctgtaccattcctactaagtattttccggattaaacattgtctagtctctcaatagtcattcatggcaaagttttttgatgtttcactgtagtgatcatcttttgttgaatatgtttgtgctgaataacatctgccctaaaaagcagtgcagtgtatgtatggtggagctattgctataacttgaccttgacactaattcttccatttctatagcatatggcagaattaggtaatttattttcttttgctttgtttgtttatttttcttatgttttaatctgtgcattaagtggtttttatacattcatattcttataatgtttaggaatgtgctgttattactgtttatgtaagacttggggcataatatttatattccttactaacttatagaccattatgttttactaagacttgttctgtaagcaagtccaattaaaaattttattttttctttattcagtatgttttcaccatttctgctattttagaaagatgtttacaagattacattttgtttatttatttcagtgttttcactttaaagagttctgtgagtcagaagtcattttgactgccctcaataaaattagtaatgcaattggtcattttctctttacagattgttcagttcaagggaatgaagaattcagaataattttggtaaatggattccaatatggggaataagaataagctgaacagttgacctgctttgaagaaacatactgtccatttgtctaaaataatctataacaaccaaaccaatcaaaatgaattcaacattattttcccaggttgaaaatcattcagtccactctaatttctcagagaagaatgcccagcttctggcttttgaaaatgatgattgtcatctgcccttggccatgatatttaccttagctcttgcttatggagctgtgatcattcttggtgtctctggaaacctggccttgatcataatcatcttgaaacaaaaggagatgagaaatgttaccaacatcctgattgtgaacctttccttctcagacttgcttgttgccatcatgtgtctcccctttacatttgtctacacattaatggaccactgggtctttggtgaggcgatgtgtaagttgaatccttttgtgcaatgtgtttcaatcactgtgtccattttctctctggttctcattgctgtggaacgacatcagctgataatcaaccctcgagggtggagaccaaataatagacatgcttatgtaggtattgctgtgatttgggtccttgctgtggcttcttctttgcctttcctgatctaccaagtaatgactgatgagccgttccaaaatgtaacacttgatgcgtacaaagacaaatacgtgtgctttgatcaatttccatcggactctcataggttgtcttataccactctcctcttggtgctgcagtattttggtccactttgttttatatttatttgctacttcaaggtaagaaaactttttttctatcatttccatttttaccttctttacacagaattcctcatcaaatgagtgtttctatttaaacttttttcttccatagatatatatacgcctaaaaaggagaaacaacatgatggacaagatgagagacaataagtacaggtccagtgaaaccaaaagaatcaatatcatgctgctctccattgtggtagcatttgcagtctgctggctccctcttaccatctttaacactgtgtttgattggaatcatcagatcattgctacctgcaaccacaatctgttattcctgctctgccacctcacagcaatgatatccacttgtgtcaaccccatattttatgggttcctgaacaaaaacttccagagagacttgcagttcttcttcaacttttgtgatttccggtctcgggatgatgattatgaaacaatagccatgtccacgatgcacacagatgtttccaaaacttctttgaagcaagcaagcccagtcgcatttaaaaaaatcaacaacaatgatgataatgaaaaaatctgaaactacttatagcctatggtcccggatgacatctgtttaaaaacaagcacaacctgcaacatactttgattacctgttctcccaaggaatggggttgaaatcatttgaaaatgactaagattttcttgtcttgctttttactgcttttgttgtagttgtcataattacatttggaacaaaaggtgtgggctttggggtcttctggaaatagttttgaccagacatctttgaagtgctttttgtgaatttatgcatataatataaagacttttatactgtacttattggaatgaaatttctttaaagtattactattaactgacttcagaagtacctgccatccaatacggtcattagattgggtcatcttgattagattagattagattagattgtcaacagattgggccatccttactttatgataggcatcattttagtgtgttacaatagtaacagtatgcaaaagcagcattcaggagccgaaagatagtctgaagtcattcagaagtggtttgaggtttctgttttttggtggtttttgtttgttttttttttttcaccttaagggaggatttaatttgctcccaactgattgtcacttaaatgaaaatttaaaaatgaataaaaagacatacttctcagctgcaaatattatggagaattggggcacccacaggaatgaagagagaaagcagctccctaacttcaaaaccattttggtacctgacaacaagagcattttagagtaattaatttaataaagtaaattagtattgctgcaaatagctaaattatatttatttgaattgatggtcaagagattttccattttttttacagactgttcagtgtttgtcaagctttctggcataaatatgtactcaaaaggcatttccgcttacaatttgtagaaacacaaaatgcgttttccatacagcagtgcctatatagtgactgatttttaactttcaatgtccatctttcaaaggaagtaacaccaaggtacaatgttaaaggaatattcactttacctagcagggaaaaatacacaaaaactgcagatacttcatatagcccattttaacttgtataaactgtgtgacttgtggcgtcttataaataatgcactgtaaagattactgaatagttgtgtcatgttaatgtgcctaatttcatgtatcttgtaatcatgattgagcctcagaatcatttggagaaactatattttaaagaacaagacatacttcaatgtattatacagataaagtattacatgtgtttgattttaaaagggcggacattttattaaaatcaatattgtttttgctttttctgaggagtctctttcagtttcattttttctcatcccatgacttccctcccatggtgttcccaaagcatcctgtatctgcttgctaatgaaacataaccactgatgtgatataaccattgatggctgtggtataaccatcaatggttataaccattgatgtagtatagccattaatggctcagtctccctctcttgctagatcgtaagcttctttaaggcaagaattgtttaatatgactgtccccagtgcatatagcacagtgcaaatacttagaagcattttcaaaatatatttccaaaacaaatgattaatgaccaagtttccttccttctcgttgataatcttattgaactcacgtcctgcagtgttcttggatccttcctcctaagttattctttaccaagaagatgttttctctttcaatgtattattttcatttctaaactgagcaaaagggcattttagattttagaaatttgcatgatcagtcctgtaactcaaatgtcacactttttgcattgaatggtaatatgaaataaaattatggcctaagaatgtcctttagttaaccaaattaaaaaaaaaaacaattcggctgggcacagtggctcacacctgtaatcccagcactttgggaggccgagacaggtggatcacgaggtcaagggttcgagaccaccctggccaatatggtgaaaccctgtctctactaaaaatacaaaaattggctgggtgtagtgctgtgtgcctgtagtcccagctacttgggaggctgaggcagaggttgcggtgagctgagatcgtgccactgtgctccagcctgggcaaaagagcgagactccatctcaaaaataaaataaaataaaattataaaattatcttttaatacttattggaaaatatcataatttttccttacccaagcctgaatttttgaactacttgatgttttttctgcttttggggacaaatgggaacttctttctttctctgtctaggtaatatggaaacaagttgttacttgggaagagtcttaataagtaagtgcttctttgtcatacatttgctgaaaaggccatttctagaattctcattcagttgtgtatgctgccaactccttgatttcacataaataatgaaccaaacatcaaattcttcttctgtccaaatatgttgatgagctactagtaaagtcaagggtcagccacagatgcattggagttcaagaagaaaaaaatggccatattaaacatgaactatggaacgaaccactgggttttcttaaacccaagaacaaaaaaaattaagttagtagaaaagtgtgatgataatgtggcttataagaattttaagtatttgataatagctagaatatttaaactagtatgtgccaagtactgtgtcaagtacttaagtacctgtgaggactaatgttactgccactttacataagaagagactgaagctccagttggaatatctgtatgaggcacacattgaataataggtaaagcaggaatcaaacccaggcctgtccagtgctactaaactaatgactgaactatacctgcaacagtttagaaaataattttcttctctctttacaagttacaatcttagggcgtaacagtgccatccaccttctttctgatttttggctgcagaaggaatggagtgaagtagaagagttgagagaaaatggtcattttgattatatgtacccattatctcccttnctgaattaaacaattctgcttaaaaatagaatttcattattcacattaattttatttctgtactgttaactttagtctcattttattttacatattccaagaaaatataagtacatattatactgaaatttattccacaaattctcaaggaaatataaatacatactgtaatttccaattttgacagtcaaatagagactttgacaatttaaatatatacacataataataatggtggaaagaggcagtttaagctggggcttcaggaatgtctggccttgtgtcgttaccgcaattcagagtttatgggtactgctaggtgtttcatcacagccagggttgctttcctcagcaatcaaggattgtgctggaattaaggtagtttctcagggagtcttgaattctttgatagtctccatattttctttgtctacttatctccatgatccatcaaacaacatgttggacttaagtttctgagcaggcgagagcagctagtgagaatgagaacatgacttaccagggcaaattagtaagatttctcaaattgtattttttaatgattcgtttattaatatatttttgtgtaaatgtgtgtgcacatgctacatattatatggctaagaatatatatatttgtatatatagatatatgtcctatataattctacagtgagtttattttcattgctattcacttcttgatctcttatcaaagctattacatatgtagtgcttatcacaaactaccctatgaagtagtacttttgtttctctcatttcacagataaggaaattcagcatgaacttgcccagtgtcactcagctagtaaatgatagaactaggattcaaatccaggcagtttggttcctgagtcttaatatgacaataagtttttaactagcacacactaaaaatcttccccacacgccaccctctgcctgaattcctcaacctctgcatctcatatctttccattactggatccacatatgacc

SEQ ID NO: 13 - DNA, 54567 bp, Homo sapiens
  modified_base (2928)..(2928): n is g or a
  modified_base (4327)..(4327): n is g or a
  modified_base (8360)..(8360): n is c or t
  modified_base (14417)..(14417): n is t or c
  modified_base (15016)..(15016): n is a or g
  modified_base (17427)..(17427): n is t or c
  modified_base (25637)..(25637): n is g or a
  modified_base (25740)..(25740): n is a or g
  modified_base (27754)..(27754): n is g or a
  modified_base (38224)..(38224): n is c or t
  modified_base (39385)..(39385): n is a or g
  modified_base (42096)..(42096): n is a or t
  modified_base (44697)..(44697): n is a or g
  modified_base (53568)..(53568): n is t or a
ggtggggatcagggaaggtttcacaaaggaagtgatatttaagctgaaatttgaggggtaaataacgcttaggctggggtattggcccagccttccgagtggaaggaatagcatgtacaaatgtcctgaggtaggaaaaaacttggcttggagggttagggaggggaccagaattccaataaagtagccctccttcttcctatcccaatttctctctgctggcactagaaaagtttctgagtaccaggccctttgggaaagggagagagttttggcagcaggtgaccacagcaaaaatctttctgataagtccttaggtggttgagtgggaaagccctggggtggggggcttgctgtagttggtagaagtggctggacagcagctaagtggggtggagaaaatggagaagagggtgagcttgggaattctggctttgcttttttctgggaaagggtaggagccttgcacatatatggatgattcaagctagagggtgagatgagggagagctccttgtccagccacacacagatccaagagcattgccccagagcctagagctcagaacccctaatattgttccactccagttccctttgggatctttattatccaaaaagtatttcttgagcacctgctgtgaccccagccctctcctggatgcaggggtcaatcagacctggtccctttaaggagggagaccagttcggatagaaataattactatatgggataatttagtgctgagcactaaatctgtaacatggggacaataataatagaagctacaccaaagtgttggtgcatggataaagtgcttatcacagtgcctggagcaaagtaatgcttggtagaatgttctggaaaggctaggcaccccaagaagaaggatggctctaatctggaatggttaggtcttggaaggggtgtggcaaggatgacttagccaagtgccccccttctatctgctcgcactgcagccagagtgctccttaaggtggtcttcaagagcctgcccaccacctcatcgccccctcacttcctgccttctcctcttcctggcttcctttcagtccctctgcttcctttatccggaatcctcttcccttgttacttccttaagttagttcttccccaaacttcacacctcacctcaagtgtcgtttccccagggaagctgtcctgacccctgggttttgtagaccctgccactttctcaattcgtacctatatcttaatgtcattttagggttgctcgctctctctcctgcactgggctgtaagccccaggaagcagaggctgcatctggttttgtgtactagagggtccccccaaatacccggctcttctattaggcaccctcagaatttttgttgagcgaatgaatggggtgcaagaaaggcacggataatataggttatttacggagcatgtaactgtccgcagggcactgctctaagctctttgttcgaatcattttattcaatctccccaaccaccctctgagggaggtggtacgattttcctcatctcacagacaaagagaatgaagctgagggaggttaagtgacttacacaaggtcactccgcctgttagtgcaggggcgggaggcgggatccacacccaggtccctctgacaccaaagtggcaagggggtgggaggggagtccaggttgggacggggtcgcactcgagccggcggagcatccctagggagggggcgggaggcctcccctgcccagctccgagccggtggtgcagcgtccgcccccggtcgcgggcgcagactggcggccgcctccgggccacgtggtgcgcgcggcgggcgcgtccgaggagcctgcgctgctcctggctcacagcgctccgggcgaggagagcgggcggaccggggggctgggccggtgcgggcggcgaggcaggcggacgaggcgcagagacagcggggcggccggggcgcggcacgcggcgggtcggggccggcctctgccttgccgctcccctcgcgtcggatccccgcgcccaggcagccggtggagagggacgcggcggacgccggcagccatggaaccggccccctccgccggcgccgagctgcagcccccgctcttcgccaacgcctcggacgcctaccctagcgccttccccagcgctggcgccaatgcgtcggggccgccaggcgcgcggagcgcctcgtccctcgccctggcaatcgccatcaccgcgctctactcggccgtgtgcgccgtggggctgctgggcaacgtgcttgtcatgttcggcatcgtccggtgagtccgctgcgggccggcgccgcagggctggagcccggggtgagggtggggatcacgaacttgagaccccaagcccgttccctggactccccgcgcctccgcatttcctgcaggggcacctggggcccagcgagaggcgaggccacttacatcgaggggaacacaggaatgtgtgtcatcgtgtgtatgtgtgtgtgtggtgcgggggggggagtgcgccgcggttgactaaattacatttgatcatctgttggcatccccttgcttctttgtgggacagtttggcgtcagtttgtgtgtctgtcacagtttgtgagtggatggttgtgacagtacaactgtatgtttggacgtcggaaacatgcccatggggtgggcagagctgctctgaggtgccgcgggcctttggggagaccggtgtgagggcaccgtgcaggcagggcggacaggagggtgctgggtgtcagcacctcgccgtggggcccttaccaagtcatatttggtgctcatctgttggtgtgagcttgtccctaacggtcagtttgtgattctgtctgaatgtaacaatgtgactgttgtttcttgtcaagctcttgaaaccccgagggcggcagagcatccggagtggccntcgtccctgtgtttgtgcagctgtgtgtgcctttgccagtgattcctggataacatgggcgacagctgtgggccgccaaccggttctctgttcccttcgccagtgcccatctggtcaggaattctgaataggattcagagaagactcacgccctcctcacaaatgccctctcccattttctctttgcctcctctaacagtcttttcttctgccagaggcagcagaggttggtctgggcgggagtggattttgagttttcatcccaggaagtgaggtgctcttcttggagtttatggagagtgctgggaccttctcagagagcctaagacgtcagcttgccccagaagtagccctcctgatacagccccacaagctcagacatggccagtaagggttgagaggaaaatttccatctttaaaacaacaaagatgccctcgtatttgctgttagttgaaaatgggtccttcatgctggtggaccaaggacatggccctaaacctctctgggctgtgggtgccaccatgcagggcataggtcaggtcgtggactcagaggttagagagatgaactgtagtctcagcctagtcatggatgcccaggcatcattcttcctgccctgcctcccatccgcctcagtttccctgttcgaagaatacagacctaatctcctcaattggaaagtatgaattccagggtatggggtctctgcagcgcagaacgtggtgtgttggagcatgggatgaggtgtgtgggtgtcagtgggcttcggcattgatgatctctgggagatctttgctcctccagaaagagtggcgggtacaagaatttcctgtgctttccatgactcatcacaagcaacagtgggagaattccccccaagcacaggcgggactgatctttactttgtgtctttgtcagtgattctccccacttcgcaggcttcgaggcaggccggcctggtatgaatccctgctctgccacgaactggctctgtgacttggatgaatcacttagcctctttgagcctcagtttcttcatctgtagaatgacgtaatgataaatcttcttccacagggttgttgtgaggtgtcagtgagagagcacataacgcactggcctggcgcctggacccagtaaatggacgctgtctgtatagcgaggcggagggattttctagatcctgtagaatctgactaaagaagggagcttgagggaggtgcttgtcctaaggtgggcctgagagtagctgtgattctgagagctccggattcctggcacctgccctgtctaggggagctccaggtgcccaagtctggaaaaagccgagcgtcggtgtgttcagtctcatttccaaccttttccccggggcctctggctggttggctgactgagcacancttccccactaccactgagcaaggggaggggactcccactgctgagggtccactgtggggaggctctgggctcagcctgctaggggcattcccacacagccttcccggaatcgcattgccaagtgtacgcaagcagcttagtgggcccctaggggtccccatgttgccaagacatttcgctggtcaaccatttatgtgaaaattgtatctctgggtctgaatgattgaatcctcaccttcaatcctatgggacaggcattagaatcatcatcagtacccgcatcctgcagataaaatgaggaatctgcagctcagagacaggcaaggtgacttgttctcggagggtaccacagttggcaccaggcccagagctagaaccttagtctgtgacttaagtccaaaacttttctccagagttgcctggggtagaggacagtcaaagcattgtctggaaggagggtggcagaattctgtccctcctcttttatttttgagacaagatttctctctgttgcccaggctggagcgtcgcaatcacagctcactgcaacctcgacctcctgggcttaatgcgatcctcccacctcaggctcctgggtagctgggactacaggcacacgccatgctaactttagttttttttgcagagacagggttttgccatgttgcctaggctggtgtcaaacttctgagctcaagcagtccacccgcctcggcctcccaaagtgctgggattacgggcggagccatggtgcccggctgtgtccctcctcttgtcttagagtcctcagagagcagagacctggggactatgctcctctgcgtttttcagcctgtgcattttaggctgctgtcctttggggaggctgaatgataagggctggcgctcagtccttccccagtgaacagtgaacgagagtctgagggcagggcagctgcctgggtcttggcttctgctggaaacaccccaagggcagtggggagagcgcagcccgggctggagaagggaccctgctcccctgaagggctcctcgagctgcgctccatctgcggtttcctggcagcccaagcagggcctgccacaaccagtacatgagccggctgctgggttgagtgaatgagtggttgaatgagtgaattctgcctgtcagtcctgagcttaggcagcatgtggggggtggggagcaggtgtgcaagggaagattcagagacccttggggaaggaaagccgggtggtgtagtgggcagagctgtggctctggaccagacatatctgagttcaaagccacttacttgctgtgtactcgggctagtgacgagctgtctgaagctcttctcattaaagtgggaacaccaacagcgcctccagggtgggggtgaggattaagtggcataatgtgtgatatctgagccttttagaccctaagctctttgagaacatgaggggctctgtgtgaaggactgaaaagaattaactcattctacaacattctacatgctctgtgctaaatgccaagaaaaaaaccacaccgtgctccagaccttccggagcttagggtctggtgggagacagacattcgtcagccagtcatccaataaactgaagtttgtagctgtggtaggggctatctgtgaaagtatgtgggggatttgggagcccatgatgggggcaggggagggtctcagctgggcggagagatcagagaagcctctgcagagctaaaggacgaggaggggaaactgagtcaaaagctgagggaggagctgtggctgggaagcaggatgctgatgagggcctgaacgtaagaaccaggaatctcagaattccaggtcagaagcatcctccatcctgcaggccccacactctgtcctctctcccctccaagaagctacctgagaagctgtctcatcctgggggcctgagaggggcctctgggaattgtgcttttagcaaacagcctgtggctggagggaatgaggcttccatgaagcgtgagcaggacttctgtggacaggtggtcccaaggcagagcatcaccccctcctcctgcatgtgggattggccagcacgatgactcgtgctggccatggggatgccctggtcctcagagcagacaccggacaaccccttcctccgggcagagtcagtgtcctctgcagggctggcatctcagagacttcccatgggcagcccactgggtaggtgtggtgtgatgggcttagcaggcccctcacctgtggcaggtgaccccctcttcctcccgcctggcccagatcctgggtggcccgacccagaacctgggcaagaggagtcagtgctttcctacctggcctcctgtctgttccacagccttctctgtttccctgcctcctctgcgccccgagctaggtttcagcaggtttgtaccctcgcagcatgccctgcctcctgccagccccggccagcctccatgagacgccttcagcctgtgtgcttctctgccccttgatctcacctcagcccatgtctcttctgatttgtctccttgtatcaaatgctggctctgctacttactaagagctttagcaagccggatcgcctcactgcacctgtcttcatcgggaagatgtgggtaatagtactatctcataggtacctttgtcctcaggattagatgagatgatgttggcaaagcaccgcgttttccctcctatctgaggtgactgcagcacccagcagggaggggagttgggccaggcaggtgggctgtggcagggtcgggataggtgaatgaagggttctggttatttcttcagtctcctgccgaggttccagaagctgctggggaaaatgctgaagtgtcttcttagcagaatttgtagcactgaatctgtgtcctgtttttggaagccccttggcttcttgtctccctcccctctcttggggtctggacccagggcctctgggccaggagagattccagtgagatgacacagtgcagtggtaaaggttgtgactagaggtcagggagcgcctggtctctatccatgtcccagaggtgtggctttgggcaaaaacagcttaacttccctttttttttggatggagtctcactgtgttgcccaggctggagtgcagtggtgtgatctcggctcactgcaacctctgcctccctggttcaagggattctcgtgcctcagcctccccagtagctaggattacaggcgctcgccaccacgcccaactagtttttgtgtttttagtagagatgggcggggcggggggggggtttcaccatgttggccaggctggtctcgaactcctgacctcaagtgatccgccagccttggcctcccaaagtgctgggattataggcgtgagccgctgcgcctggctcattttatcatttaaaaaattggggcgatatgacaggttattgggaggactcaaagagatcgagcatggaaaggctgtagcatagcacctggcatgccctgcgctgtggtttcctgcagtggctgcaggtgggcagagtgcaggtgggctgttgaggcctggtcgtctatgttttccacctttggccctttcccatgtcctgcattgcctgcacgtgtactcagtcagtaaagcatttgctgatgctgacccatgccaggcctgtccagcctcagctctcactgcccagacccacagcttaaacctccatacgccccctggctcctaacacagctatgtcccatgccaccccctggttagttgcaactccacagacaagtgcagctccctggaactatgggagtccagggagtctccagacccagccagaggaggggatgcctgtgcatcatggaggggagcagcagttggctccctggagaggtgtgagtggagcattccagatagagggaaccacaggagcaatgattcaccaattcaccgaggctgagacgagagtgttggggaccagggtggctgtgaggatggagaggctgcagggacaaaagcaggaaaggcgtcgtaagcaggtgtccttcttaccatagtgtcaaaagnacctgctaggtgctgagcttggctgggctcgggagccacccatgattcctgaggagatacacctggtagagtagccccaggtaattggaggcaggtgttctcatggggatggtgagagggagggctgaggagaggcctggaggcaggcccagcatgactgtgtgaggagccagaggccgtgctgaggttctagtctggatgtgggagctgaggctggacaggtcctcaggggtcccatggtaaggttggcgtgctgggaaatgaggaagctttgggtcacaggccatggggagggggattttggagcaatctgtgcagaatggtcttcaagagaatgaatttggtgtgggggtgaggggtggattggatggggaggggctcaatgtggggagactagagagggtggctcagggcaatgaaaagagagccatgtgaccttggatggggccattaaaaccctgtgctcagctgtcccctttctgaaatggagtgctgttggacctaacaagaaggcaggaagctgtgcatggtggtgcatgcctgtaatctcagctattcaagaggctaagatgttgatcagactggacaacatagcaagaccccatttcaaaaaaaaaaggaaggaggcagcaggaggaggctgggctagatgacttctggtgaggctgagcagagagaacaagcagcagccctggctgctgttcctgctgcatctcttggtcttgcctggagcctgcttcttcctgggtcttgggttcattccctggggagtgtgtgtgacttacagacgcactgcggtgggtccataggagtcactgagaacactgaaaagcctcttcctaagcttctgccacatgccagaggcttctggatccagaggccatattgaggttgaagtatgcaagctgcaccacagccctgtgatgggggctttctgttctcatttgcaaatggggacaagaaggctcagagggagcgagtgcctctcacagcaagagaggggtggagtcgagattccaacccaggcctctctgactccaaaatcactccatgtttccatctgctgctgctgtccatgacatggcggaatggaggcgagtgctggggacgtctaggtagagaagcgaggaatggggatggggtagagggtagattgctgtctgcaaatctctgaggcctctgcatggggtggcagcagttgagagcctgggcattggagccagactgacctggaattacatcccagcggtgccatttactaagagagtgagcttgaacaatacatacacaccctctctgagcctcagctttatcatctgtgaaacgggagtagtgatagaccctcacagagtggttatgaggagttcacgaggcctgatatgagggacttcagcacagagctaggcatttggtatgtggtcaataaacatcttctgtaattatgactatttagaagaggagtcacacttgctttgcattcatttgattgacatttatcgagcctcagaggaactagatttttttttttttttttttttgagatagtctcgctctgttgcccaggctggagtgcagtgacgcaatcttggctcactgcaacctctgccttctgggttcaagcaattctcttgcctcaacctcctgagtagctgggattacaggtgtgtgccaacatactaggctaatttttgtatttttagtagagatggggtttcaccatgatggccaggctggtctccaactcctggcctcaagtgatccacctgcctcagcctcccaaagtgctgggattacaggtgtgaactggaactagaattattgagtgggtggtatagggaaactttatcaactcaatattataaattttcagctgggtgcagtgactcacgcctgtaatcctaacacttcgggaggcaaagcaggaggatcactggagtccaggagttcgagaccagcccgaacaatatggcaagaccctgtctctacaaaaaaattaaaaagttagctgagcatggtggcatgcacctgtagtcccagctgcttgggtggaaggatggcttgaacccagaaactcaaggtgacagtgagctatgattgtaccactgcagtccagcctgggcaacaaagcgagatcccatatctcaaactcctgaccccaggtgatctgcccgcctctggcctcccaaagtgctgggattacaggtgtgagccaccgcatctggcctgagaccccatatttaaaaaaaaatttttttttcttctacaataaaaggtaacaaacttatttcagaaaatgtggagaaatttaagcagagacagacattatccataatcctaccacagagaaaagagctttttcattttggtgtgtttccttcccatctcttttctgtctctctttctgtttctcaattttatttatttttatttattcattttttttgagacagagtcttgctcttgtcatccaggctggagcacaatggcacaatctcggctcactgcaacctctgcctcccgggttcaagcagttctcctccctcagcctcccaagtagctgggattacaggtacctgccaccatgcccggctaatttttgtatttttagtagagatggggtgtcaccatcttggccaggctggtcttgaactcttctcttgacctcaggtgatccacctgccttggcctcccaaagttctgggattacaggcatgagccaccgtgcccagcttatttttatttttgagatggggatctccttatgttgcccaagctggtcttgaactcctggactcaagtgatcctcccaccttggcctccgaaagtgctgggattacagtcatgagccgacacacccagctttgtttttccattttagtgaaatcagggtcacatgtcgaagtcatgatcgcattgcatgtaatattttgtgagatgcctattcacttaacattatatgttaagcatgtgctcttctagtttgaaaacatgatttttgatggctacattgcatgaatgtgttctttttccagtgacttttataatttccaatattatgccaatctaaataatgctgctgctgcccgggcatggtggctcacccccataattccagcactttgggaggccatggtgggaggatcacttgagcccaggaattcaagatcagcacaggcaacatagcaagaccctgtctctaaaaacaaaaaaatagtaatcatacataatgctgtgaacattcttagacatgtgtgtttgcgcacatctcattatttctttcttttttttttttgagatggagttttgctcttgttgcccaggctggagtgcaatggcgcaatctcggctcaccacaacctccgcctcctgggttcaagcgattctcctgcctcagcctcccgagtagctgggattacgggcatgcgccaccatgcccggctaactttgtatttttagtagagatggggtttctccatgttggtcatgctggtctctacctcctgacctcgtgatccgcccgactcgtcctcccaaagtgttgggattacaggtgtgagccaccgcgccctgctatttcattatttctataaggaattttcccacagtcaaagctctccaagaaggtacgggctgctgtgtaatgtagggagcttcctgtcactgaagtgcgcaagtagacactgggaaaccactgggtggaggtttggccctggagattcgggtggagaaaagacaagcagaattgcaggcccctctcaccatggctgagattttattttattgtttgtttatcgattgattgattgattgactgattgattttagacggagtctcattctgttgcacaggttggagtgcagtggcgcaatctcggctcactgcaacctctgctcccctgggttcaagcaattctcctgcctcagcctcccaagtagctgggattactggcatgtgccaccatgcccggttaatttttttttttttgtatttttaatagaaacggggtttcaccatgttggccaggttggtctcgcactcctgacctcaaatgatccacctgcctcagcctcccaaagtactgggattacaggcacccaaccctgagattttaaaaagaatgatttttaaatgctgtgatctcaggttctccttcccccttgcctggcagatgtctggactttgagaggcagggggctgtgcaaggaaaaggcatgatttcattaacctcagagtcctgggacctcaaaatcaaattggccacacggaatgtcataacatgcacaggaagagggataatcgtgggggtagagcagaaagtctggcttaaatgaacaatttaccatcctctgcaggctatagtggccccattaccggctgggagctgtggggtggaatgagggggtgtctgggttgtgttctactgatttatagttcccagtgcagctgcagaaatcagcagctttgtctctggccaggaagggtgtgtgcagaaagaatcttttcttctgtagtcttttttttttttttttttttttttgacatggagcctcactttatcacccaggctggagtgcaatggtgcgatctcggctcactgcaccttccacctcctgggttcaagtgattctcatgcctcagcctcccaagtagctgggattacagatgtgcaccactacacccggctattcttttttaaattttatttgtttgtttatttatttatttatttatttatttgagacggagtcttgctctgtcacccaggctggagtgcaatggcatgatctcggctcactgcaacctccgcctcctgggttcaagcaattcccctgcctcagcctcctgagtagctgggattacaggtacgcacaccatgcctggctaatttttgtattttttgtagagacggggtttcaccatgttggccgggctggtctcgagctccagaccttgtgatccgcctgccttggtctcccaaagtgctgggattacaggcgtgagccactgtgcctggccaatttttgtattttttagtagagatgaggtttcactatgttggccaggctggactcgaactcctgacttcaggtgatccacccacccggcctcccaaagtgttggcattacaggtgtgagccaccgtgcccagcccgtctttcttgataagtagaaagaactcaaacttcaaggtcctgtgaggtcaaaaaaaccccattcaggccgggtgcggtggctaacacctgtaatcgcagcactttgggaggctgaggtgggtggatcatttgaggtcaggagtttgagaccagcctggccaacatggtgaaactttttctctactaaaaataaaaaagttagccgggcggtagtggtgcatgcctgtaatcctagccactcgggaggctgaggcaggagaatcgcttgagcctgggaggcggaggttgcagtgagccgagatcgcatcactgcactccagtctgggtgacagagtgagaacctatctccaaaaaaaaaaaaaaaaaagccccattcaaagaacaccacacagagagaggcagaattttcctcccctgcagaaatgagcttgttaccaaggcatagaactgtgactcatggatgatggttctttttcttttttctttttttttttttttttttgagatggcgtctggctctgttgcccaggttggagtgcagtggcgccatctcagctcactgcagctccacctcctgggttcacggcattctcctgcctcggcttcccgagtagctgggactacaggcgcccgccaccacacccggctaatttttttttttgtatttttagtacagacagggtttcaccgtgttagccaggatggtcttgatctcctgaccttgtgatccgcccgcctcggcctcccaaagtgctgggattacaggcgtgagccactgtgcctggctgatggttctttttcttgagtacctattttgtgccaggcaccctgcctagagatgtatatatattatcccatttaatttttgcagacctcgtaggaggtgagtgtgttgcccccatngtatacataaggaaacttgaggctcagagaaacgacataacatgcccaaagtcccaagataattttgaaatcagaagagtgttgttctgaacccagagcccacactctttttttttgagacggagtctcgctctgttgcccatgctggagtgcagtggcgcgatctcggctcactgcaagctctgcctcccaggttcacgccattctcctgcctcagcctcccgagtagctgggactacaggtgcccaccaccgcgcccggctaatttttttttgtattttttgtggagatggggtttcaccgtgttagccaggatgatctcgatctcctgaccttgtgatccacctgcctcagcctcccaaagtgctgggagtacaggtgtgaaccactgcacctggccagagcccacactcttaaccattgccttgttctctgccaccttgtatgtcaagttcagcccctctgatttacaaatgaggaaaccgagacctagaaaggttctgtgtcttttgagtccatggccaaggctggactagaactgcttttcctatccccttgctccctctccttgtgtctctttgcacaattgggattttccnaagtgagagagaggcagggagtggctggaaatagcagtacttgggaacacaagaagtaggttcttttttttgagacagagtctcactctgttgcccaggctggaatacagtggcacgatctcggctcactgcaacctccacctcccgggttcaagcgattctcctgcctcagcctcctgagtagcttggattacaggcgcacgccaccacatccggctaatttttgtgttttcagtagagacagggtttcatcatgttggtcaggctggtcttgaactcctgaccttgtgatccgcctgcctcagcctcccaaggtgccaggattacaggcgtgagccacagcgcccagcccaagaagtgggttcttacacagggcagcctggcctaggggctactgataacacatgataggcctaaagaactccaggttccctgggacaaggccaacagcagggaggcagccctgtccttcatcagcaggtggactagggttcaaatccagcttcttgctggctgtccactgttgaactcagcgtgctgtctgttttctcatctgtgaaatggggatgatagaaaaactctacatcattgggttgtcccccctgaagtaccaggcacagttctaggtacttgggatgcaacagtgatgaagacacagtccttgccctcatggagctgacagtctagtggggaaaagatggacagtaaacaaatagatataaggctaaggctataggcagtgaagtcaaccgaaacaggcattgggtgagagggtggcggggctgcagttgtacaggcatacctcagagatactgtggtttgggttccagaccactgcaataaagcaaatatctcaaagcaagtcacacacattttttggtttcccagtgcatataaaagttgtttacagctgggtgtgctgactcatgcttgtaatcccagcactttgggaggctgaggtgggcagattgcttgagctcaggagttagagcccagcctgggcaacatggcagaaccctgtctctacaaaaaaatacaaaaattagccgggtgtggtgacatgcacctgtagtcccagctactcgggaggttgagatgggtggagcccaggaggtcaagcctgcagtgaaccgagatcacgccactgcagtgcagcctgggtgagagagccagaccctgtctcaaaaaaaaataaaaaaaaaagttgtttatactgtagtctattaagtgtgtcatagtattatgtctaaagaaaaatatacatacttcaattttaaaatacttttattgctaacaaaatactaatgatcatctgagccttcagcaaatcataatctttttgctggtgaaaggtcttacctcaatattgatggctgctggttgggggtagtggttgccgaaggttggggtggctgtggcaatttcttaaaacaaggcaacagtgaagtttgctgcatcaattgagtctttctttcatgaaagatttctctgtagcatgcgatgctgtttgatagcatcttaccaacagtagaactttcaaaattggagtcagtcctctcaaatcctattgctgctttatcaactaaattaatgttatattctaaatcctttgttgtcatttcaacaaagttcacagatcttcttcaccaggagtaaattccatctcaagaaaccactttcggccagaagcggtggcttacgcctgtaattccagcactttgggaggccaaggtgggcagatcccttgaggtcaggagttcaagaccaacctgggcaacatggcaaaaccttgtgtctacaaaaaaatacaaaaattagctgggcgtggtggtgtgcgcctgtagtcccagctactagggaggctgaggtggggggattgctgaagtccgggaggcagaggttgtggtgagctgagattgcaccactgcactccagcctgggtgacagagcaagaccctgtctcaaaaacaaaacaaaaccaaaagaaaccactttctttctttttgatttttgtctcactgtgttgcccaggctggagtgcagtggctactcacaggcacgatcatagctcactacagccccaaactcctgggcccaagtgatcctcttgcctcagtctcctgagtagctggtagtacaggcgcatgccattgcgcctagcttcaagaaaccactttcttgctcatctataagaagcaacttctcatccattaaagttttttcatgagattgcagcagcagcaattcagtcacatcttcaggccccacttctaattctagttctcttgctatttctactacatctgcagttacttcctccactgaagcctcgaacccctcaaagtcatccatgagggctggaatcaacttctttaaaactcctgtcaatattgtttttttcttttcccccngctcagagacacagtcttagtctgttgcccaggctgagtgcagtgatcatagctcactgcagcctcaaactcctgggctcaaactatcctcttgcctcagtctaccaagttgctgggactacatgtgtgtgccaccatgtctggctaatttatttattttttatttttattttttgtagagccggagtttctgtgttgcccaggctggtctcgagctcctggcctgaagggatcctctcacctcagcctcccaaagtactgggattacaggtgtgagccaccacacctggccacaaatgtacctaatggcaactagaatggtgaattttttccagctttcagtttcctctgcccagatccatgagaggaaccactatctatgacagctgtaaccttacaaaatgtatttcttaaataataaaacttaaaggttaaaattattccttgatccgtgggctacagaatggatgttgtgttagtaagcatgaaaacaacttaatctccttgtacatctccatcagagctcttgggtgactaggtgcattgtcaataagcgataatattttgaaaggaatctttttttctgagcagtttgtctcaacagtgggcttaaaatactccatcaaccatgctgtaaacagatgtgctgtcatccaggctttgttgtaccatttatagagcacaggcagagtagatttagcataattcttaagggccctaggatttttggaatggtaaatgagcatcggcttcaatttaaagtcaccagctgcattagcccctaatgagtcagcctggctgggtgcggtggctcatacctgtaatcccagcactttggaagccgaagagggagagtcgcttgagctcagaagttcgaagctgcactgagctatgatcgtgccactgcattccagcctgagtgacagagtgaaactcgatctcttaaaaaaaaaaaaaaaaaaaaagccaggcgcagtggttcacgcctgtaatcccagcactttgggaggccaaggcaggtggatcacctgaggtcaggagtttgagaccagcctgaccaacatagtgaaacactgtctctactaaaaatacaaaaattagccgggtgtgatgatgtgcacctgtaatcccagctcctcgggaggctgaggcaggagaatcgcttgaacccaggaggtggaggttgcagtgagccgagattgcgccactgcactccaccctgggtaacagagtgagactctgtctcaaaaaaaaaaaaaaaggagagagagggagcatcagtctctccttgaagctttgtaaccaggcactgacttctctctaggaatgagagtcctagatgatatcttactccaatagaaggctgttttgtccccttgagaatctgttgtttagtgtagctgccttcatcagtgatctttaaagccccatggaccagcctctgccaccttcaaacttgtcttctacagtttcctcacctctttcagccttcttagaattaaagagaattaggtccttaccctggattaggctttggcttaagggaatgttgtggctggcttgatcttctatccagaccactcaaaccttctccatatcagcagttaagtgtattttgtttcctttctttctttccttcttttaagacagagtcttgctctgttgcccaggctggagtgcaatggcgcgatctcggctcactacaacctcctcctcccagattcaagtgattctcctgcctcagcctcctgagtagctgggattacaggtgcccgccaccacaccagctaattttttgtatttttagtagagatggggtttcaccaggttggccaggctggtctcgaactcctgacctcaggtgatccacccacctcggcctcccaaagtgctgggattacaggcgtgagccaccgtgcctggccttctagattttgatctacagtgcaagacatgcgaccctttcattttctttttatcttctgagacagggtcttgctctgtcgcccaggctggagtgcagtgatgcaatcatgcctcactgcagcttcaactggctgggttcaagtgatcctctttcctcagcctccgaagtagctggaactacaggtgcgcaccaccatactcagctaattttttaattttttgtagagatggggactcacttttttcccaggctggtcttgaactcctgagctcaagcaatccttccagctcagcctcccaaagtgctgtgattataggtgtgagccactgcacctggccctttctttcacttgaacacttagaggccattgtagagttattaattggcctaatttcaatattgttgtgtctcagggaatagagaggcctgaggagagggagagagatggggcaatggccagtcagtggagcggtcagaacatacacatttatcaattaagttcatcctcttacaggcgtgtggtttgtggcactccaaaacaattacagtggtagcatccaagatcactgatggccaggcacggtggtcatgcctgtaatcccagcactttgggaggctgaggtgagagaatcgcttgagcccaggagttcgagaccagccctggcaacataatgagactccatctctacaaaatgaaaaaaacaatagcaaggtgtggtgggacatgcctgtagtcctagctacttgggaggctgaggtggaaggattgcttgagcctgggaggtcgaggctgcagtgggctgtgatagtgccactgtactccagcctgggcaacagagtgaggacccagtcaaaaataaaacaacaacaacaacaacaaaaacactaatcacagataaccataagagatataattatgaaaaatttgaaatattgcaagaattaccaaaatatgacatagatacaaagtgagcacttgctgttggaataatggtgctgataacttgctcatagcagggttgccacaaaccttcaatttgtaaaaaacacaatatctacaaagtgctttaaacgaggcatacctgtatatggagaggtcaaagaagaggagacaaatgagcagaggactgttgcttggaggaagagtgttttaggcagagggaacagcaagggcaaaggttaagggggatgatgctgtatggctttagcacagggcctggcccacagcaagaagccattggtgataatgaggccttttggatcattgcccagcacctgggaaccagggcaggaattaagccagagcggagatgctgcttctcctggccccaccagatgctgtccccaccagatgcccctgcaggacagatggagataatctgtttcccttggttacaaaaactcatcctcccacagtgctgggaaataccccacatctagtgattttccattcctccctgaggggagcgaatggagctgtcctgctgggaggggcaggttagccacaagacactccttccacctgcctaggccttgttgtcccatataagagagggctcggcctggtgtggtggctcacacctgtaagcccagcaatttggtaggccgaggtgggtggatcacgaggtcaggagatggagaccatcctggccaacatggtgaaacactgtctctattaaaatacaaaaattagccgggcgtggtggcgtgcgcctgtagtttcagctactcagaaggctgaggcaggagaatcgcttgaacttgggaggtggaggttgcagtgagctgagatcgtgccactgcactccagcctgggcgacagagtgagactccgtctcaaaaaaaaaaaaaaagagctcaacagcaaagcatagcatactgactcggtcggagttaacaccaaaaatagaactgctgacttttttctttctttcagtgatcatggctcactgcaggctcaactgcccaggctcaagtgatcctcccaccttagcctcctgagtagctgggaccacaggcaccaccatgcctggctaatttttttatttgtagagatgaggtctcactatgttgcccaggctggtcttgaactcctgggctccagtgatcctcctgccttggcctcccaaagtactgggattacaggcatgagccaccatgcctggctgaccttttttggatgctgacaaggtggccagctttgtgccaagctctatgtgaagcattgcacataggttatttcatttaattcagccagctctatgagtttagtaccatgtttctctccatttgacagatgagaaaactggggctcagagatgataattcacttgcccagggccacagttaggaagtggcagagccagcctttgaactgaggccccttgactctcagagctcagatgtacaaagtgtccatgaagcagtgtccatgaagcaatgtccatgaagaaggctgaacctatgataccctctgatttccactgtggaaaaatgactttttgatacagccagggattgggagaggctgtggaacagagcagacttatttgtaatgtcattaaaataatttaaaaaataatccattgttaataaacaaaaggaaagagaagctcttttgggtcccaggcagagagatggcataagaagtaaaggccaagctcagtggctcctgcctgtaatcaagtcggtaggaggcctgctttgggaggccgaggtgggagaatcgctcgagcccaggagttcaagaccaacctgggcagcacagggagaccccatttctacaagaaatacaaaattagccaggaatggtggcacacacctgtagtcccaacttcttgggaggctgaggtgggagaattgtttgagcccgggagctggcggctgcagtgagctgtgattgcgccactgcactctagcctgggtggtagagtgagactctgtctcaaaaaaaaaaaaagtaacatacagcatggccaaaggcctggagtctgcctgggctttttggaatgcctggctttgcatctcagttctgttcattctacactcctggatgagcgcctttcatctttgggtcagtttcttctataaacaaaatgggaatatactgagacccacttcctggggtgtgtgtgattcaaatgagagaacatgtgtgatgctctgaacaggggctccctagcccattgtcttcaaagggtatttctttgctggggagctgggtgggtacaggttagggaaactgtaacatctacatcactgtcactaagaataataaacttgtggacattatttacgtggaattgtgggactgaaacattaagctggcagatggtgaggactcaaaatcatgaagaaccgagaaattacaactgtggaaaaaatgagcctgtgtttgacaagattagaaggctctctacaggagaccttgcatgcaaaatctcactgagtcttcacaacacttctatgaggtaggaacaatgtaatgtgcccattttacaggtgaagaagctgagactcagagatgaaagacttttgcctaagggcacctggttagtaagtgtctgacagcaaagccccccatgtgatggtgggtgtcactgcccttttccagctcaggagactgcgtggctctgtggcaccagccttggcctagagcgtgggctttgggtctgtatcaggcatgatcctatcagagaaaaagcaccagtaggatatatttcagggagttggcttataccgttgtggggtctggctgggcaagtctgaaagtggtaggtggaaaactcaggcaggagctgatgctagaggtggagtttcttctgagaaatctgttttgttcataaggcctttgaactgattggaaaaggccaacccagatgatcaaggataatctccttaaagtcagctgatggcagatactaaccacagctacaaaatcctttcacagcaacgcctcgattagtgtctgataaaatagccgggtactatagtctagccaagtcgacacatcagactaaccatcacggggccagacagacctgggcttgagtcctggtactacaacctgtcagctgtgtttcgttgggcaagtttccctgactctctgatccacagtcccctcatctaccaaatgccgtggtagtgcttactacatttggctatcaggattaaatgcaatgatataaatcacagtgccttcatccagtgcctgtcacctagagagagggaagacacacacaaaagtaggtggtcacaaaccagtgttctgtttttttgttgcccaggctggagcgcagtggtgtgatctcggctcactgcaacctctgcctcctgggttcaagtgattcttctgcctcagcctccagagtagctgggattacaggtgcactccaccatgcctgactaatttttgtatttttagtagagacagggtttcaccatgttggccagtttggtatcgaactcctgacctcaggtgatccgcccacctcggcctcccaaagtgctgggattacaggcgtgagccaccgcgcccagccttgaaccagtgtgtccccatgacagtgctgctgcttgtttctgtgcttgcattcccttttaccagttcctcctggagggcaggaactgtgtcacattcatcctcaatcctgtttcgtagcttagtccctcaccctaaggaggcatcactaagtatttctttctttttttctttttttttttttttttgagatagagtcttgctctgtcatccaggctggaatgtagtaactcgatctcggttcactgcaacctccacctcctgggctcaaatgatccttccacctcagcctcctgagtagctgggactacaggtgtgtgccaccatgctgggtaatttttaaatttttgataaagataaggtctccctatgttgcccaggctggtctcgaactcttgagctcaagtgatcctcccacctcggactcccaaggtgctgggattacaggtgtgagccactgtgcccattcaggtacttcttaaatatccagatggcactttgttaacgagatttggtctgtagagttgttgggatctataataaaaatcacccaactacgagacaagagggcagtaagatgtgcaggaacctcaggctgctgtctccttcagagaaacccctgacttttcagcttagaaagtctttcctccagggagccttctctgattgctcctcaccgcccttccagccaacaggtaaccctcctctatgttcccacagtgtcctgtgtgtcccccgccattggaatagggtctatgcactatttcagacacctgtttgctcccctgttctgctctccccaccatgagtgggtgtggggtagagggagtatatcctttgttcatagctggagccccagcagagggtccaacactcagacagcatgtcactaggtgtttgtacaaaggacctgtcctatttccagaggtccagggtctgatatgccacatccttgtgggagtctgcgttcttgggcccccattgtgcctgctgccccatccctggtccagccacccctaagccagaagcagagccagggtggtggggaggagctgctcttccctggctgccatgagtgtgttgttcttgaactgaggtgaacgaggcatctgtcctgcttcttgttgagtgtgacctggctggcctccctgctcatgttcaactctggggcctggatttctctgttccagcctttaatcttctcctatgacatgctctctgggcttcattataattaaccactttccttcctcaggctgtgccaaaactgagacagctaattaatttctggccacttgccactctcgttaagtggtgggcagggatgcagcctgcagctcttgctgcccagctgggcttgttttgccagtcgtggagggcaaccaccctttgtctgcaaatagagggagccccagctggaccccggctgactggcagtagcttcattgaagctatttgttcccccacagtgggcagagcctttgtgatcactgtggtagatgtgccttggtttcctcatttgtaaaatcaagggaatgaacttgacctgcagcagggagaagattgggtggtggttaggagtgtgggttctggagtccaaggaacctgagacccaagctaggccctgccatccctagctgtgggcctctgggtgagttacttcatccctctgagcctcaacattccccacctgtaagatggggagagcagtgctcacctcctgtggcggttgtgcggattcantgggttatggagcacatggctgccacttaggagggagactggcacatagtgagcgctcgtaaacgctctacccagacatctctccttctaggctaacattctntattcttgatggaaaaaaggccttctgttgtgagagctggggtgtggagcaattttaacagacattgcttctgtgtttaggccatgcctggtgagatggttagccccttcgtatagttccctagggctgccatagcaaattgccataaactgggtgacttaaaacataagacatttcagccaggcgcggtggctcacgtctgtaatcccagcactttgggaggccaaggcgggtggatcacaaggtcaggagttcaagaccaacctggccaatatggtgataccccgtctccactaaaaatacaaaaattagccgggcttggtgatgtgcgcctgtagtcccagctactcaggaggctgaggcagaagagtagcttgaacctgggagaggttgcagtgagccgagatcgcgccactacactccagcctgggcgacagagcgagattccatctcaaaaaaaaaaaaaaaattagacatttcacagttcaggaggctagaagtctgaaatcaaggtgttggctgggctgtgctccctccgaaggctccgtggaagaacgcctgctggcccggcttcggtggttgctggcaatccttggcattccagctacctcactttaattttttcctgttttcacatggccatgtatgtctctgtgtcttgtgtcctttgtttgatacagggcctctctctgttgtccaggctggaatgcagtggcatgaacacagctcatgacttcctgggctcaagcaatcccaagtagctgggaccagtgtgtgccaccatgcccagctattttttatagcagcggtcccgaacctttttggcatcagggaccaatttcgtggaagacaagttttccatcgatgggggcagggtgggggaacggggatagtttcaggatgattcaagctcattacatttattgtgcactttatttctattattattacatcataatatataatgaaataattatacaactcaccgtaaggtagaatcagtggggctcctgagcttgttttcctgcaactaggtggtcccatctaggggtgatgagagacagtgacagatcatcaggcactagattctcataaggagcttgcaacctagatcccttgcatatgtagttcacagtagggttcacgctcctatgagaatctaatgccattgctgatctgactgatctgacaggaggcggagctcaggtggtaatgcgagcaatggggagtggctatacatacagatgaagcttcactcgcccactgctcacctcctgctctgtgggctggttcctgtaaaacagggttggggaccaggtgcagtggctcacaccaggaatcccagcactttgggaggccaaggcaggcagatcacgaggtcaggagatcgagaccagcctggttaacatcatgaaaccctgtctctactaaaaatacaaaaattagctgggcatggtggcgtgcacctgtagtcctagctactcgggaggctgaagcaagagaatcacttgaacccaggaggcggagcttgcagtgagccaagatcgtgccactgcactccagcctggtgacagagtgagattccgtctcaaaaaaacaaaaaacaaaaaaaacaaaaaaaaacccaaaaaatggttcgggacccctcttttatggagagtctcaccgtattgcccaggctggtcttgaactcctggactcaagtgatcctcctacctcagccttccaaagtgggattacaggtgtgagccatgacacccaactctctcttcatgtaaggacaccagtcatataaggacccaccctaatctagtatgacctcatcttaactaattacatctgcaaagtccctatttccaaatagtgtcacattccgatgttcctggtggacatggattttggggcacactattgaattcagtataccctcccaaggcttactttcctcctctgtacactgaggatggcagcaatttcatagggtttttggagtgattaaatgaggtgatctctntaaatgtcatagtagcattcgatagaatgtgtcagttgtgtaagcactgagtccacatagctgctgagatggagatggtggtgaaatgatgatagtgattgagatggttccattcatggacctaccctatgctggttaatcactagacacagggacctagaatgtagacatctgccaagagccgggaccttgtcagaaattctgaagtcttggacaggattctccttcccctttagcctcagccaccttgaacctcacctgagacttagttcctaggtcagcttgaagaagcagaaggaacttggtttcccagaagtcagcagaacagattttctgtgtgaccttgcacaactgttttcccctttccaggcctcagtttccccatctgtaaagtgagagaggaggtttgaacccattgttacccatcagagcctcttccagcactgaagttccaacacagggctctgtgtctcacccccatggtggcaggttaccaagagccagcagagaagtcaggggccctgggactccaggggcagcctcaaaggtacattttggatccatcttgttcacttgagcaagaagagaagccactatgatatgggtgcaccaggcagagtgctaggaacatggcaggcattacctcatttgatattccccacaccatcacgaggcaggaaagatcatgataaccagttcacagaggagtaaaccgaggctcagagaagttagagctcacccaagatcaatgcaattagttagggacagagctggggcttcagtaggtgtgtccagtgtcaaagtccatgcttctccttgggctgcccttttttttggttgttgtaagagatgggatctaaagctgtgtcgcccaggctgaagtgcaatggctattcacaggcaccatcgtggcacactactgccttgaacttccgggctcaagtgatcctcctgcctcagcctcccaggagctgagactatgcatactttttcagattagttccctggggctgccaaaataaattactgcagacttgatggcttaaaacagaaatgtattctctcacagttctggaggccagaaatccaaaatcaaggtgacagcagggctgtgctttctctgaagcctcttggggagaatctttccttgcttcttcccgtttctggtggctccaggctcttcttagtttgcagctgcatcgtctaatttctgcttccctcttcacacggccctctcctctcctccctgtgtgtctcttacaaggacacttgttgctggagttagagtccccctcaatgatccaagatgggcttgagatccttaacttaattatgactgcaaatgattttgcatttatagtgagcagctgttatttctgagagctcgaacagcatttgggaataaaattaattctaaatactccagcaatccacactggatttggttggagaccaaatgagctttggtctaggctggagccgtttgttcagtttggttcctgaggtaccacagggtcagtgcgactgggtgtagacgttctcaccttgttgctgttgttgttactgtttttgattttaggtctcttgcccccaccttgaactcatgggctgttgtgcatcagtgggaaaaaaaaaccctcagtttagttaacgacaaattagctaccttggataaatgatcagagtaaacatttcccccacgaccagcagagctgagtcacttcagacttcagggcaaaccgggtcaggcccaggcatccttcagggcacctgggctggcccagggtgagcatgggagaaggtaggaagggagggagggaagaaggacgaaaggagacagtgcaaggggaagggaggatgaggaagagagatgctctgattcgatctctttggtctgttgctcattactgaggatcagggcaccctggcacctgcactcagggttcctccagtaagcgctgtgtctcctctgagcctggccctgtgctgggtgctaggtcctgggagacagcatgaaggggacacagttcctgcctgagggatgtctcagtctagtgtggaagacagacacatgaacatttattcatttcacaaatgtgttttgagtacctgctttgtgctgggtgctgctgtaggttctaggctcttcgtgatagccaagacagacgtgatccctgccctctgggagcttatatatatatgagatagagtctcgctctgtccctcaggctggagtgcagtggcgtaatcatagctcactgcagcctctacttcctgcactcaggtgatcctcccacctcagcctcccgagtagctgggattacaggcatgagccactacctggcaaaaagagtatgtgaaggacacatagagtactttgggtccacaggagagaagctaaaactgaagccaagaagaaggcactgggatttcggggaaaagcactgggtttgactctctgctcagcctatttgccactctgcagcctggggcaagtcccactgtctgtaaattgggaataataaacactgtctgccccatagtgaggattaaataatgtaaaatacggggccaggcgtggtggctcatgcttgtaatcccagcactttaggaggccaaagtgggtggatcacttgaggtcaggagttcaagaccagcctggccaacatggtgaaatcccggctccactaaaaatatgaaaattagccgggcatagtggtgggcagcggtaatcccagctactcgggaggctgaggcaggagaatcgcttgaactgggagacggaggttgcagtgagctgagatcacaccactgcactctagcctgggagacagaatgagactccgtctcaaaaaaataaaaaataaaaatgaataaataaagtaaaatgcttatcccagtgactggaatatagtaagtgtccaacaaatgtttattatctgttaaaaaacaaaaccaattacaggcttaaggagcacataaaccacacctgagaaagacctagcacatagttatccatgaatactggctgctgcccccttgggaccagaggtgtacattttgttctgaattgacctgtcctctttgctccactgggccccacattcgtgcctgtgacgttgttctgatgtttataagtctgtctctccctgaccccacctgggctgtgagcacattgtctccaaatccttaaaccagagccgggttggggaatgtgtgagaagcagatgaatgctacggtgtgggcccatccccagcccagcccggccccttgccatggccaaggtttcacaggtgcaggtggcaaggaggctgggggaaagcggacacagacccaagtggttatgagcttaggctctggaaaccagatagatatgcgcttgtgtcctgtcaccgccacttcttagctgtgtgttttgggtgagcatctaacttagctcatttgtaggatgaggctgagatgaaatcctgcattcactgcttttggcatagtgcttggcgcataagagaatattgtttaaaggaaacaactcacccaaagctgctggtcctgtcccattgacaccttgcacaaaggaaggaatgtattgatcttctgggcactgggcatttatttatttatttttattttatttatttatttattattattattatttttgaaacagagtctcgctctgtcacccagactggagtgcagtggtgtgatctcagctcactgcagcctccgcctcccgggttcaagcgattctcttgcctcatcctcctgagtagctgggactacaggcatgcaccaccacacctggctaatttttttttttttttgtatttttagtggagatgggctttcattatgttggccaggctggtcttgaactcctggcctcaagtgattcacccacctcagcctcccaaagtgctgggattacaggcatgagtcattgtgccggccttatttttatttttatttttattttgagacagggtttcactctgttgcccaggctggagtgcagtggcatgatcatggctcactgcagcctcaacctcccagactcaagcgatcctcccacctcagcctccggggtagctgggactataggcatgcgccaccacgcccagctaacttttgtatttttagtagagacgggggttcgccatattgccccagctggtctccaacgcctgagctcaagcaattcacctgccttggcacccaaaatgctgagaccacaggcatgagccactgcacccggcctgagcaccgggcatttagacgtcggccgctctgaccaactgctctggctttgcctggggagaacattcttaccaggagcttacttgtcagtcagcacttgggtattcagttgagaagcccagctctccagaggcccaggaacaagtgtggattgaatgtggcctggctgtgccagggtacaaccagtctccatcaaactgaaagaaaattaatagaggtggtgatgatccttctgcagtgggggcttgtttaacagaggagtgtagggctccgaaaggaacacgcatagccactcagtgcttggtgctaaggaagctttgtggatttggaatcagaaagaaagcaaagggtttcacaaaggtatctcacggtcaacagaggttcagccagagctttccagtccctaccccctgattggatccaaagggtgatgattaaaccctaaaataaaaaagcaggccaggtgtagtggctcatacttgtaatcccaacattttgggaggctgaagtggagatcacttgagtccaggagtttgagaccagcctggacaacatagcaagatcccatctctaaaaaaataataattaaaaaaattagtttggtgtgatggcacgcacctgtagtcctagctacttgggaaaaaaaaaagaagaagaaaaagaaaaataccaggtcagggagtaccaaaagggctgcaattttcaactacacactggcttgtatgctgcacgctttcacacgtgcggctcctagaaagcatcattacactgaaattaccaacaaggaagcaggttcagaaaggtgaagtgacttgctcaagatcactgagctatgtatgttggggagccaagatctgaatggctcgaaaggaccccctcaccccactcccaagcttagaaaataaacacagcgacagctcttgattaccgccttttttattgtgataaaatatacacaacataaaaaataccattgtaaccatttttaagggtgtagttcagtggcattaagtacattcacactgttatgcagccatcacaaccgttcgtctccagaagtttttcatcttcccaaactgaatctccataccatttaagcagtaactgcccatcctccccttgccctagcccctcgtaaccccagggcttctgcctctatgactgtgactactctaggtgcctcatgtaagtggaatcattcagtgtttgtcttttttgactggcaaattttatttagcacgatatcctcaaggttcatccttgttgtagcaggtgtcagaatttccttcttcttcttttttttgtcttttgagacaggctcttgctctgtcgcccatgctggagtgcagtggtgtgatctcggcttactgcaacctcaacttcggggtcaagcagtcattccacctcagcctcccgagtagctgggactacaaacgtgcatcaccacgcccggctaatttttgtattttttgtaaaactggctttgccaccaggctagaaatttccttcttttttaagggtgaataatattccattgtatgtctataccacattttgtttctccatctatcaatggatatatgggttgctttcaccttttagctattatgaagaatactgctatgaacatgggtatacacacagctcttcaaaaccctgcttttaattcttctaccagaagaggaactgttggattgatcataagaggcaattctattttcagatttgtgaggaattacagttttgttttccacagtggctgcaccattttacatttccaaaaacggtacacgagagttccagtttcttcaaatccttgccaatacttgatttctgttttttttttttttttcattatcttaataggtgtgaagtggtatctcattgtggttttgatttgcatttccctaatgatagtgatgttgagcatcttttcatgggcttattggccatttgtatatcttttttagggaaatattcaagacagggtctcactttgtcgttcaggctggagtgtagtggtgtaatcatggctcactgcagcctcgacctccaggactcaagcgattctcccacctcggccctccaagtagctgggactacaagcgcatgtcaccatgcccagctaatttttgtattttttgtagagatggggttttgccatgttggccaggctggtctcaaactcttggactcaagcgatccacccacctcagcctcccaaagtgctaggattacagatgtgagctactgtgctcagcccttgttcattttttaattaacttatttgcttttggttgagttgtaggaattctttatatagtctggatattaaccccttatcagatatgtgatttgcaaatcttttctcccattccatgagtgaccttttcattctgttgacagtgtcatttgtttttgtttttttgagggggtgacagagtctcactgtgttacccagactggagtgcagtggcacaatctcggctcactgcaacctccacctcccaggttcaagcgattcttgtgcctcagtctcccgagtagctgggattacaggtgtgcactaccactctcggctaatttttgtatttttttgtagagatggggtttcagcatgttggagagactggtctcaaactcctgacctcaggtgacccacctgccttggcctcccaaagtcctgggatgatagtgtcatttgaggcacaaaagttttaaatgtgatatagtcagccgggcatggtggctcatgcctgtaatcccagcactttcggaggccaaggcgggcagatcacaaggtcaggagttcgagaccagccttaccaatatggtgaaaccccgtctctactaaaaatacaaaaattagctggggccaggcacggtggctcatgcctgtaatcccagctctttgggaggccgaggtaggtggataacttgaggtcaggagttcaagactagcctggtaaacatagtgaaaccctgtctctactaaaaatacaaaaaaaaaattagccgggcatgctggtgggagcctataatcccaggtgcttgggaggctgaggcgggagaattatgaggcagaggttgcagtgagccgagattgcaccactgcactccagcctgggcgacagagtgagactccatctcaaaaaaaaaaaaaaaaattgatatagtccaacttaatgtagttgttgttgttgttgtggcctaggcttttggtgtcatatccaagaaatcattgccaaatctaagaagaaatttaaaaaagaggaaaaaaagaaagaaaaacaaacaaataaacacaagaaatcattgccaaatctggtgtcatgaagctttcccactatattttcttctaggagttttatggttttagctcttacatctttgatccattttgagttaatttttgtatatggtgtaagggaaaggcccaacttcatatccacaaccttttgtaacagaaaaaaaaattagagaacaacagtagagttttgggaaatggagccataaacaatttctctttctagaaagttgggtctctggctccctactgccttgtgctccatctggcttccacacagtagtcagcgtgatcttttaagaaactcacataaatgaaccacatcacttccctgtttaaagtcttcaatggcttcctgttacactcagagtaaacccaaacttcttgccatagcccaaaggccctgtgtgatttgactcctgcagatttccgctgccgcctctcctgttgcctcctttctggctcactacactgtcgtcacatgtgatttctgaccattcctgcagcccatcaggctctttcctgctacagggactttgtacatgctgttccttctctttggaccaaccttcctccttcacttcacatggctaactctcatccttccaacctggcagaaatgttgctgtgtcttagatcaaaatatagactggatggcttcaacaacagagatttagtttctcagttcgtaaggacagaagcccaagatcaagctgccaccacggtcaggttctggtgagggctgtcttcctggcctctagatggctgcctcatcactgccctcacatggcagagagaaagagagagagagcaaactcgggcagatcacctgaggtcaggagctggagaccagcctggccaacatagtgaaaccgcatctctactaaaaatacaaaaattagctgggcgtggtggtgggcgcctgtaatcccagctactagggaggctgaggcacgagaatcgcttgaacccaggaggtggaggttgcagtgagccgagattacagcactgcactccagcctgggcgacagagcaagactctgtctcaaaaaaagaaaaaaaaaaaaaaagagagagagagagcgagcaagctctctggggcctctcttgtaagtgcagtaatcccaccatcccaaaggccccattgtatttattcagagttgtatcacatggaggctgtttgcattttctttctttctttctttctttcttttctttctttctttctttctttctttctttctttctttctttcttttctctttctttctttttctttctttctttctttttcttccttccttccttccttttctttctctttctctctttcttccttccttcctttctttactttcttcctttcccttcctttcctttcctgtcccctttcctgtcccctttcctttcccctttcctgtcccctttcctttccgacggagtttggctcttgtggcccaggctggagttcagtggcgcgatctcagctcactgcaacctctgcctcccgggttcaaccaattctcctacttcagcctcctgagtagctgggattacaggtgcccgccaccatgcccagctaatttttatgtttttaatagagatggggtttcgccatgttggccaggctggtcttaaactcctgacttcaggtgatctgcctgccttggcctcccaaagtgctgggattacagccgtgagctaccgcgcccagccgagcctgtttgcatttctgacctgaggacacctcagaggtgacaggaccagggcagaggtccagcccaaattgacatgagtgcacttaaatggaagggcccaggttctttgacgttgtacatgtaccagctgaggatcaaatggcatgtgttattgggagaagcagtctctgtggacatggatactgaaagaataataaaggctgggcacaatggctcaggcctgtaatcccagcactttgggagactgaggtgggtggattgcttgagcccaggagtttgagaccagcctggacaacatggtgaaaccctgtctctacaaataatttaaaaattagccaggtgtggtggtgtgcacctgtaaacacagctacttgggagactgaggtaggatcgcttgagcccagaaggccaaagctacagtgagctatgattgcaccactgcactccagcatgggcaacagggtgagaacctgcctcaaaaataaataaataaaaataaataaataaaaccagaaaatcaagtgttgtgttgggcttagggctctcatatgtaaactgcagaataaagccaaaaacaaaaaacaaaaaaaacccagttattggaaaaaaaatttgccaggcacggtggctcatgcctgtaatcccagcacttttgggggccaaggcaggtgaatcatgaggtcaggagttccagacgaatctggccaagatggtgaaaccctgttccctactaaaaatacaaaaattagccgggcgggatggcgggtacctgtaatcccaagctactcaggaggctgagaaaggagaatcgcttgaacctgggaggcggaggttgcagtgagccgagatcgtgccactgcactctagcctggacagagcaagactccgtctaaaaaaaaaaaatgacagcaagagaaaccccaataccatcacgttgggagttagggcttcagtatatgaatttgagggaactgaattcagttcatagcacacctcctcagagaagccattgttgaccttctaatctaagccagggtccctccacactccccagcctgtcacccccactaggcagtgtccatcaatatactccgttcttatccttcatggcatcttggtaatagcaggtaactgttcattaattaatgcagcagtttgttcaatgtctgccccctccctaaggtcanagatttcaagaggccagactgtcgccattactcctagatcacttattcagtgcctggcacagttcaagtgtccacttaatacctgttagatgagtgagcaaaccccagtttatagtaagttcacattctttttcactgtgagaggtggggaaggaaggaagataacaagtactgagtggttaccagatgttggcacttagactgagttcaataccagctctgccacttactggtcatatgaccttggataaatcacctcgcctcttgtgtctcagtttaccttctctaagagatgtcaatacatatttggaccacgagaaacaactggaagaggaatgacagcaggggtgaggtgtgggacagaaaacaggggcaagaggatgattgtctagagggagtactgggactgttaggcacccccatctttgtatcctgcacaaccagatggctaccctccactctgcaagaaggcaaggttttttcttttcctggagaagttaacatggaggaagtctggactcagggccagcagacacagaaagggtcaggacaagataccaaaggtaaatggggagcaggaggccaggcacggtggctcatgcctgtaatcccagcactttgggaggctgaggtgggaggatcacttgagcccaggagttggagaccagtctgagcaacatagtgagaccctcatctctattttaattttttttttaatggggagatggggggactcccgggccctttctccagctctgccaacagaattctggcagccagaggtatgcaacccgggtgagagatggggagattattttctgaaggcctgaaggccagagaagagacctacggaaattgatatttacatgtgcctcagtgtaaaagccagatcatcactcagttcccctacagtgaagcccaccagttgacagagccctcacactgatacacatacacacacacacatgcacacacacacacgcacacacaggggcacacacacgtgcccacgcacacgtgcacacgcacggagctgccagttatttagtgcttcatttaaaaatcagcgtttaattatattatatatcaccagatacttgaaggaattctccaggataagagaggaaggctaaagcagatgaaggaacaaaaatgtttgangcaagtaaaagatgcagagagcagaagaaaatactaaacaaggcttcttagcatcctcggagagttaagagaaggtatcatgtccctgaaataagatactataagtgctatatgaaaaaggaataacaagagaagaagaaagggcactggaaaaataaaacatgagagtcaaacttttttttttttttttttttttgagacggagtctcgctctgtcgcccaggctggagtgcagtggcgcgatctcggctcactgcaagctccgcctcccaggttcacgccattctcctgcctcagcctccagagtatctgggactacaggtgcccgccactacgtctggctaatttttttgtatttgtagtggagacagggtttcactgtgttagtcaggatggtctcaatcttctgacctcgtgatctgcccacctcggcctcccaaagtgctgggattacaggcttgagccacggcgcccagctgagagtcaaactttttaaaaagacaggggccaggcatgatctcttgtgcctgtaatcctagaactttgggaggccaatgtgtaaggaacacttgaacccaggagttcgagaccagcctaggcaacatagggagactgcatctctacaaattttatttttttgagacggagtttcactcttgttgcccaggctggagtgtagtggcacaatctcagcccaccgcaacctccacctcctgggttcaagcgattctcctgcctcagcctccagagtagctgggattacaggcacgctccaccacgcctggctaattttgtatttttagtagagatgaggtttctccatgttggtcaggctggtctccaactcctaacctcaggagatccacccacctcagcctccccaagtgctgggattacatgcgtgagccactgtgcccaacctaaaaaattttaattagctaggcatgatggtgcacctgcgaccccagctactcaggagtctgaggtgggaggattgattgagcctaggaggttgaggctgcagtgagctgtgatcacacgagtgcactccagccttggtgacagagcaagatctgtctcaaaataataataataataataataataataataataataataataataataaaaggtcaatggaagaatcgagagataacaaaaaggaaatttcccagaggatataacaaaagaggatgtgaggaaattagaggatctatccaggaggcccaatatctgactaagggattttccagggatcccagagaaggcaaaggggaggaaatggtatgagaacgttttatactgaaggacatgaatcttcacacacacacggagctgccagttcacctaggagagatggggaaggaaggaaggtaacaagtactgagtggttacccttagagggcccaaaagaaatgaaaaagagccacttgaaagcacaccgtcacaaagtgtcagactaccagggataaagagaggaaccgacaagttatgcaggtagagaggacagatcacatacaaaacatcaggaatcagaatggttttagatgcttcagtggcaacactggagtctggacaatgagggagccatgccttcaaaattctgatggaaaattacttccaacctaccatttcatctccagtcaaagaaatcagaaattaggatagaataacgacattttcagacaagcaagggtgtaaaaattctacctcctatgtgccctgtctcaggaagtgattagaggatgtcttccaccaaaatgaaggcatagatcaagacagaggaagacttgcaagccaagaaacgggtgctctagccgaggaggacaggtgcgcagctggtgtagaatagaaagcaaacagtgcagatggaaagtggggaggaggccgggcaccgtggctcacgcctgtaatcccagcactttgggaggccgaggcgggcggatcacctgaggttgggagttcgagaccagcctgaccaacatgaagcaaccccgtctctactaaaaatacaaaattagccgggcgtggtggctcatgcctgtaatcccagctactcgggaggctgaggcgggaaaattgcttgaaccggggaggcggaggttgcgccattgcactccagcctgggcaatgagagagaaactccgtctcaaaaaaaagaaaaaaaaaaaaaaaagaagaagccgggcgtggtggctcacgcctgtaatcccagcactttgggaggctgaggtgggcggatcatgaggtcaggagatggagaccatcctggctaacacagtgaaaccccatctctactaaaaatacaaaaaattagccaggcgtggtggcgggtgcctgtagtcccagctacttgggaggctgaggcaggagaatggcatgaacctgggaggcggagcttggagtgagccgagatcacgcaactgccctccagcctgggcgacagagcaaactccatgtaaaaaaaaaaaaaaaaaaaaaagaaaagaaagaaagaaaagaaagtggggaggaaaggtccaggacatagctcatagctcactaggaaaacaaaaagaactggtagattatgcaattggatggaagagacatcttataggtcttttggaatgtttgaggagatttagcaatatgtacacagaactaagcaagtggagaaaattggcgcaattattacctctgggaaacttaaatgtctgcactaaaanatgtaattatagtatgttctttggcttagcagtggacaatatctacaaagtcgtaagaatgtaaaccctaaatattgagttagctaaaaatggtgataaaactatattggagccagacatggtggtgagcacctgtagtcccagccactcaggagtctgaggccagagaatcgtttgagcccaggagatggaggctgtagtgcactatggttgcacctgtgaatagccattgcactccagcctggacgacatagcacgaccccatctcttaggattttctttctttctttttctttttatttattttttattttttatttttgagatggagttttgcttttattgcccaggctggagtgcagtgggatggtcttggctcactacaacctctgccttcctgggtgcaagcaattctcctgccttggcctcccgagttgctgagactacaggtgcccgccaccacacccagctaattttttgtatttttaatagagaagaggtttcactatgttggccaggctaatctcaaactcctggcctcaggtgatctacccaccttggcctcccaaagtgctgggattacagacgtgagccaccgcgcccagccaagaccccgtctcttagaaacaaacaaataaacaactatgttgggaggatggagagaggaacaattgagtgatgtgatgagttagccctcatctactgtaatagggcattgtgaggaacattactagtgttcactaatatctgcttctccctgctttgggtcacatagaagactatttctcaaccccttgcagttgggcatggccacatgactacttttggccagtcagcttcaggtggaagtgatgtgtcgccactggactaaagtttagatgatcctgcagctgcctcttctccctctctggtgatcaagggggccttgggttaagacagcagggccacaggggtaaagcagcctggaatggcctcttggaatttagattgtcctggaaacactgaatggactctgtgagagagaaacctttcatttgttaaaccactgggatttgggtatttaggcatagccttgcttaaccaaatccacgcttcaacaagtactatctaaaatggatgaatcaagaaatagccacgtaagcatattctttagaattgtggagataatcactataagaatagctaaaaacattcaaagtgattgcccctggggaacaggacagaggaataagagagcaaggatgggtagaggggcagctgttctcattattgtcctgtatgactttttacactatgtaattgtgttacattggcagaaataaaattttcttttttttttcttttttttttttgagatagggtttcacctagtcgcccaggctggagtgcagtggcgcaatctcactgcagcctctgcctcccgggttcaggtgattctcctgccttagcctcctgagtagctgggattacggtgctcaccatcacgcctggctaatttttgtattttttgtagagatagggtttttccatgttgtccaggctggtcttcaactcctgagctcaaacgatctgcctgcctcggcctctcaaagtgctgggattacaggcatgagccaccacatctggccagaaataaaattttctaaaaagctatatacatatatgtaatttggaaggatcctcaccaagtcatgatagtggctgtctctcgggagagagggcgtgctacacagaacatgtgaggaactacagatgtggccagacccgggatggcactgtgggaaaggaggctacccaaatggaaagccagtttagggagctgtttgtttttagacatggggtgttgctctgttccccagactggagtgcagtagcattatcagagctcactgcagcctccaactcccaggatcaagtgttcctccttcctctgcctcctgagtagctgggtctataggcacactccaccatgcccaactaattttttttttttgagacagtgtcttgctgtgttgcccaggctggtctcaaactcctgggctcaagcagtcctcgacctcagcctcccaaagttttaggattacaggcgtgagccaccatacctggccaaatctgccttttagagtgagccgccaacttacgtgggtgatgaattgtgggagagggaggctgccgcagtgtccctgtgcgagctggtgaggttggactaagacatccacatcacagatgtctcttgtgagcctgctttttttttttttgagacagagtctcaccctgtcacccaggctggggtgcagtggcatgatctaggctcactgcaacctccgcctcctgggtgcaagcaattcttctgtctcagcctcctaagtagctgggattacaggagcatgccactacgcccggctaatttttgtattttagtagagacggggtttcaccgtgttagtcaggctggtctcgaactcctgacctcgtgatccacccacctcagcctcccaaagtgctggaattacaggcatgagccactgcgcctggctgagagcctgcttttttgccgggcactgctggtaggcccaagggtacagcagggaacaaaatggncgaagtcttctggcttcagggaacttacatgggcgagagacccaagtgggcagaaaagaagatgaatgtaagtcaggaagtggtttgtgctgtaatgaaaaatgaagccgctgaaggagctagagagagttggtggggaggatggtactttagatagagtggtcagggagggcctccctgaggaggtgacatttgaatagagtcctgaattaagtgatggagcaagccatgcaaaatatggggggaccggggttccaggcagaggcaagagcaagtccagaggccccgaagtggggaggtgggagcgggcttgacgtgtccagggaacatcaaagaggccagtgtgtggcaggggcacatcggtggaggggaacatgctgggaactgagatcccaaaggtagtcggggcagcttgcagaacagagagaattttgggaagtcgctgggggactgagagcaggggagtggcatgatttgtcttggggctggagaagggagtctacggtggccagaaggacggggcgtggctgtgggtggaggggagagaggggggccgtgaggagaggagcccggggccctacctggcgggcaatcagcgctgggccgctcagcccgcttggaccaactacagcagcttcatcacccacttcccagcatcccagccccctctgggaatggaaggatccttcacaaatcaaaatagcaggcaaagaacagcctctaattgttctgcgtaagagcagagaaattagacgagtcagctgtggggttgagaccgcctcccacacagctgtgatcccacaccccactgaagacacttcctgagacttgcaattctgctgtatctgagcaaaactttttccttctccagccccagagcaaatgacagctatttgggagggagtaggatagatgctgccctggaggacaatgagtgagtcaatttcttttcaaccaaaaataccagtcacttcatgcaggaacagccttagctgatgcgagtttattccgtcattcaaaaacactgagtgcctcgtcctaggtgtccagggctgggcatgggatcagagcgattctaaaggaatggaggcatacagtatggggccacccttggggtggtggaaagagggagcgtgggagtcaggaggtctcagttctcgccttggctccgccactgttgctgtgtgaccttgggtgagtcctgctgcctctctgggcttcaatctccctgtctctcccaaatggaggctttaggctacatagtaattctcaaacttttgagttcataagaatcacttggggtgaggaggtgcttcttaaagatgaagattcccaggccccagttccagagataaagatcgctcagatctgaggtgcagttcaggaccctgcatttcttccaggctcttccggtaattctgaagcgatacctcaggccacgctttaataaaatcacttcccctcaatgtgtctctcttcctgctctggaattcaaggagtcactcatgtaaccctcctctgggtatctcagatcactccagaggcatgagagcagcgtcatatagccctgtctcggggtgcccgtgtgttgctgtggtggtgacactgcatttgggaaggtctggctcagtgtatgcagtctcccccaggctacctgttgccctgcccaggccctggtgcagaaggggccatggctgtaaactggccaaacaaggggccaactgtaatgtagatagctgtgcagggcagagagcatggagggatgctgggagtgctgggtgcagagtttggctatagacatctggcctggacccctgggctcatgccttgggttggatgtgtgaccctgtcacctgctccgcttccccacaccactgtggatgggaagagggatgcactgtggcttctgcagagaggtgagtccagttgcatggggatgaagaggcctggatggagccgcaggaaggactgggggctctggtctaccaccgaggacacccagggggtctcagaccccagccaatctactaggcagtgtcccttcctcagagttgaccaatcatactccccaaaggctaggtcagtgccaggagctagagaatcaagtcactctggtctagcccccagctccattcttcacctgtgaagaaaaagaacagcgattgtgtccagagtgctctccatgcatcaggcttggagctaagtgctgtgttagcttattaaattttcacagccatcctaagaggttgctacaaacattacccctctttttacagttatggatgcagagccttagagagttcaagtttctaactcagagtcactcagctaatataataagtagtagaggcaggattagaacccagatttgctttctgctggagcccagttttatttttaaacatattgcttagtacctttcagaagataagtatttttctttttcttttcttttatttacttatttatttttgagacagtgtcttgctctgtcaaccactccggagtacagtggtacgatcttggcttgctgcaacctctgcctcctgggctcaagcgaccctcccacctcagtctcctgagtgatgggactataggcactcaccaccatgcctggctaatttttgtattattattattattattgttatttgtagatatggggtttcactgtgtcgcccagggtggttttgaactaggctcaagcaatccacctgccctgccttggccccccaaagtgctgggattacaggcatgagccactgcacctggcttaggatttttcttttttgtttttgagacggagtctcggtctgtcgcccaggctggagtgcaatggcactatctcggctcactgcaacctctgcctcccgggttcaagcagttctcttgcctcagcctctcgagtagctgggacaacaggcgtgcaccactacgcccagctaatttttgtattttttgtagagacagggtttcaccatgttggttggtcaggatggtctcaatctctggacctcgtgatccgcccacctcggcctcccaaagtgccgggattacaggtgtgagccaccacacccggcctaggatttttctttttttttctttttttttttttttgagacggagtctcgcttctgtggcccaggcgggagtgcagtggcgcaatctcggctcactgcaagctccgcctcccgggttcacgccattctcctgcctcagcctcccgagtagctgggactacaggcgcccaccatcacgcccggctattttttttgtatttttagtagagagggggtttcaccgtgttagccaggatggtctcgatctcctgacctcgtgatccgcccgcctcggcctcccaaagtgctgggattacaagcgtgagccaccgcgcccggccaggatttttcttaaaacaccttctgccaaagttattcacaaccagagaaatccttttgcttctgttgtcggggaaaggagcgatgccaaatcagatagtgcagggttctagtcccacctttgccccaacccttttttttttttttttttgagacagagcttcgcttttatcgctcaggctgaagtgcaatggcgcaatctcggctcactgcaacctctgcctcccaggttcaagcaattttcctgcctcagcctcccaagtagctggaattacaggcacccaccaccacacccagctaatttttgtatttttagtagagatggggtttcgtcttgttagccaggatggtcttgaactcttgacctcaggtgatccacccgccttggcctccaaaagtgctgggattacagttgtgaggcaccatgcctagcctcccctgaccttttgcatgtccttaggaaagctacttcccttccttgagtttcatgtgaaactgaaatctgtgaaatgggattaattacacatgcatttctttctaaggtacactaagatgaagacggccaccaacatctacatcttcaacctggccttagccgatgcgctggccaccagcacgctgcctttccagagtgccaagtacctgatggagacgtggcccttcggcgagctgctctgcaaggctgtgctctccatcgactactacaatatgttcaccagcatcttcacgctcaccatgatgagtgttgaccgctacatcgctgtctgccaccctgtcaaggccctggacttccgcacgcctgccaaggccaagctgatcaacatctgtatctgggtcctggcctcaggcgttggcgtgcccatcatggtcatggctgtgacccgtccccggggtgagtgagtgagtgcaccatggcacaggccactgaccacaggaggcagtacatgggcctttgtgggcttgcagggcacttaccagggtgagtgtaggtggctcatcagcagaggttggattctgatcaagatcaatgatggtgtggtggctggccagtgggagtgtagaagaaggtcaaccaatgggaatgggaatagctggccaggggggcatgcggatggttgactattgtgaagatgaatgactgatcagtggtcatatgggttgctggccaaagggaatgtatgaatttatgaaggagattatggatggctggttatgtacatgtaggtggctggccagggatgtgtggatgtatagagagatggttggatgtccagtgaggtgagggtgtcactgaccagtgagcagtggaggctgcaagatctgtggtcccattttaaactccctttcatcctaatttgaaaaccactggcctggatgaccaaagcaaagcctagagaatagcctgcagggaatgacaaataggagctaaaatggtaattatagtaactgcctgtatcaggggagctgcaataacattctccaaagctcaggggcttaacactgtagaggtttctctctcactcccatcacaatccagtgtgagtaggaggagcacagacattcagggacccagcctcctgttgatggtttctgaatcttctactgctggcatctggccggcagatgaatatggagagggagcgaggagaaagcacagccactttaaatgttggttgggtgcagtggctcatgcctgtaatcccagcattttgggaggccaaggcgggtgaatcacttgaggtcaggagttccagaccagcctggccaacacggtgaaaccctatctttactaaaagtacaaaaattagccaggcgtggtggtgggcgtctgtagtcccagctacttgggaggctgaggcaggagaatcacttgaacctgggaggcggaagttgcagtgagctgagatcatgccactgcactccagcttgggcgacagaatgggacttgtctaaaaaaaaaaaaaaaaatttatggcccatttcttctagtgacagctggtcacatggccccaccttaatgcaaggaagtgagaaatattgtttagaagggctccacagacatagtaactaattaacctctctgagtcacactatatcatgagatgttgagaaggttaaaagagataatatgtgtagaatacttaggacaagtcctggctcatcgccaaggcccaatgaataatagctattaaatgattaagcctgtgagatagacaaggcagggactcctacctccatttgactgtagggaaacagaatcagagaggtcaggtggtttacttagggtcacacagccaggcattttgtggaatttggcctgcaacctagggttcctgcccccaggtctgttactccttctagtcccttttgtggaagtttgcagagggttgatgctgtgggtgggagagaacaagcttcttggttacctttgaccctcacaagggcagagtccctggtgcccttttatagcctgtgagccattggccttgactcacagcagagccccattcctcactgtcagccttcagcttacgggccattaactgcatccctcctggggctggaccagatgggcctcctcactccacaatccctcacacacacactttcccagtgtgtgccatcagcacttattgaacctgtgggccacttgctgtgtgaccttaaacaagtgctgttctggttcctatacaatgaaggtcttggattcagttacttctaggggtcctgccagcctgatgtcctgtggacccactctgtctgtggatccccagccccttctcacttcttagcctcaagtccatcgtgtggcttcttaaatcctagcattccaagagatcctgggagtcccctgggccagcctcaaggctgtatcagaatcccacaacaccccctaaggtgttcatccagcccaagcccacactccaggaatggggagctcatttcatcctaggcacccttcctatctcaagaaggaagtccttgagttaagctgaagtctgctttcctcccagaaggaaggaagttttgttttgtttttgttgttgttttgagacagggtctcgctctgtcacccaggctggagtgcagcggcactatcccagcttactgcagcctcaacctccagggcttaagcgatcctcccacctcagccccccaagtagctgggactgcagatatgcaccaccatacccagctaatgtttgttttttttgtagagatggggttttgccatgttgcccaggctggtctccagctcctggactcaagcagtccacctgcctcagcctcccaaagtgctgggattacaggcatgagccccatgcctggccaggaggttcttgtgattaagctgagacctgcttccctctagggagcctgaccctatccttgagtcctggactcccccacatatatgcccctctttccctgtgggtacgccaagagcttgaaccccactatgctaaatgctttaggtaccttagccttttcttttcttttcttttttttttttttttgagacggagtctcgctctgtcgcccaggctggagtccagtggcacgatctcggctcactgcaaactccacctcctgggttcacaccattctcctgcctcagcctcccgaggagctgggactatgggcacctaccaccatgcccggctaatttttttgtattttttttttagtagagatggggttttaccgtgttagccaggagggtctcgatttcctgacctcatgatctgccctcctcggcctcccaaagtgctgggattacaggcgtgaactaccgcacctgtccgccttagcctatttaatccttacgacaatcctggagatgtgggtactgtcattagccccactccactgaagctccaagaggtttagtaatttccttacactatgtagtagggcctgagtcctgctcctagctcatgttgtctgtcttagcagtcctgtccccaatggagctagtttggaaatgggtcaaggtgctttgagttactgcaatgactggcattcagtgggctgagctaaacgatttcattacggccacccatggacacaaaggctgaaaaggggccaggagagaacataggggacctccctgatgagggccaatcctgctaggtctttacggataactaagagttcaccaagtaccgaagccgaggaggacactccagacagaagaatccccttgaacaaaggctgggaggaggtggtgggacttgcccaagccttgaaagggtgggcaagcaggtgggggccccttaggcacacaggcccctcaccccgtctgtctttccttgtttccgcggcccagacggggcagtggtgtgcatgctccagttccccagccccagctggtactgggacacggtgaccaagatctgcgtgttcctcttcgccttcgtggtgcccatcctcatcatcaccgtgtgctatggcctcatgctgctgcgcctgcgcagtgtgcgcctgctgtcgggctccaaggagaaggaccgcagcctgcggcgcatcacgcgcatggtgctggtggttgtgggcgccttcgtggtgtgttgggcgcccatccacatcttcgtcatcgtctggacgctggtggacatcgaccggcgcgacccgctggtggtggctgcgctgcacctgtgcatcgcgctgggctacgccaatagcagcctcaaccccgtgctctacgctttcctcgacgagaacttcaagcgctgcttccgccagctctgccgcaagccctgcggccgcccagaccccagcagcttcagccgcgcccgcgaagccacggcccgcgagcgtgtcaccgcctgcaccccgtccgatggtcccggcggtggcgctgccgcctgaccaggccatccggcccccagacgcccctccctagttgtacccggaggccacatgagtcccagtgggaggcgcgagccatgatgtggagtggggccagtagataggtcggagggctttgggaccgccagatggggcctctgtttcggagacgggaccgggccgctagatgggcatggggtgggcctctggtttggggcgaggcagaggacagatcaatggcgcagtgcctctggtctgggtgcccccgtccacggctctaggtggggcgggaaagccagtgactccaggagaggagcgggacctgtggctctacaactgagtccttaaacagggcatctccaggaaggcggggcttcaaccttgagacagcttcggtttctaacttggagccggactttcggagttggggggtccggggcccgacccagaaagggcagtggtggggacagttgcttgaaaactgagctgcaagactgggcctctgtgtagtagggaggagcctcctgtgaggggagacccagagacaggacagctgggtgtggctacagctgaagatttggtcaccagatagggcgcctgtgcaaagggcctgtggcctcanctttggatacgggatacagtcccagccctgagttctagcaaggggcaaggctcgctgaggtccaggtccgacttgacacctttataaatagaatataaaagactgaggggccaggcgtggtggctcaagcctgtaatcccagcactttgggaggccgaggcaggtggatggacatgagcccaggagttcgagactagtctgggcaacatgggagaccctgtcgctacaaaaaatacaaaattagccaggcatggtggtgtgtacctgcaggcctagctccttggaaggtgagaggatcacttgatcccaggagtttgaagctgcagtgagctatggtggtgccactgcactccagcctgggggacagagtaagactctgtctctcaaaaaggagagagagggagaatgagggaagaagagataggaagagagagaaacagtataccttttatctctttgacaggcatgtatttccttggaatgggcaggaatccctcagaatcggtggccacagtggggcttgggacaggacagcagagcggggggcagccactccaggatagggtaataagacaggaccttggttggagtagggtccccagaactgagtactaatgggggcccagaggcttgggaaggagaaggcttccaaaaccagttcgaaaacccagacccggagtggacctccgtgccaaggggtggtggtgggtgggtggaggaagaggtgggctcctgcttcaaggttaggtcttccagtggaaggtggatgctttctgtgagtccccagggccctagtttctctggcccagatactggaggacagaggaccacctacttagatcccgtagatggtaagtggtgcctgggactcttgagggcggggggcggggtatgagaagcatcagttcgcacttggtgctgggtcctgggccctgataagaacctggatgaaatcctcttccattctcccaacatctggctgcatccatgtgtctggtg

SEQ ID NO: 14 - DNA, 212623 bp, Homo sapiens
  modified_base (4010)..(4010): n is c or t
  modified_base (8702)..(8702): n is a or c
  modified_base (9409)..(9409): n is t or c
  modified_base (15715)..(15715): n is c or a
  modified_base (22359)..(22359): n is g or a
  modified_base (48590)..(48590): n is c or t
  modified_base (52627)..(52627): n is g or c
  modified_base (55186)..(55186): n is a or g
  modified_base (60535)..(60535): n is t or g
  modified_base (64174)..(64174): n is c or t
  modified_base (64943)..(64943): n is a or g
  modified_base (77336)..(77336): n is c or a
  modified_base (80139)..(80139): n is g or t
  modified_base (82587)..(82587): n is a or g
  modified_base (83298)..(83298): n is g or t
  modified_base (90472)..(90472): n is c or a
  modified_base (96810)..(96810): n is c or t
  modified_base (97661)..(97661): n is t or a
  modified_base (99573)..(99573): n is a or c
  modified_base (123768)..(123768): n is t or g
  modified_base (126262)..(126262): n is g or a
  modified_base (127937)..(127937): n is t or a
  modified_base (128043)..(128043): n is c or t
  modified_base (152156)..(152156): n is g or c
  modified_base (159260)..(159260): n is t or g
  modified_base (160222)..(160222): n is g or t
  modified_base (165085)..(165085): n is t or g
  modified_base (169236)..(169236): n is g or c
  modified_base (173459)..(173459): n is a or c
  modified_base (178716)..(178716): n is c or a
  modified_base (178981)..(178981): n is a or g
  modified_base (179035)..(179035): n is c or t
  modified_base (182068)..(182068): n is g or t
  modified_base (182243)..(182243): n is a or g
  modified_base (183113)..(183113): n is a or g
  modified_base (190771)..(190771): n is t or c
  modified_base (205957)..(205957): n is g or a
  modified_base (207984)..(207984): n is c or a
  modified_base (211170)..(211170): n is c or t
  modified_base (211273)..(211273): n is g or a
  modified_base (211885)..(211885): n is g or a
tgtttatggttaaaagatatgtacatgcacagatatatacatgtacagaaatgagaattacttcagaattggtgttaactttagaaaaaaaaagaccaagaacttactcttggtatttacaaatttatttctaaaatagaagcactcatggacttagaagtaaggtataaaattcaaaaacgtatccatgtttctcaaggatcttgttgtaggccactctaattccatatattatgtggcttttcctagaatttttacactagaaaacagactgaatgcaaattttgttttgttttaacaaccttcttctcagaagcatatgtctatcgaggaagtcttcagataaaaaagataaacaattccaaacaggtctatgagatttaagatgtgaaagatcaacattatctttagttgactttactggatgccacaaccttctgatttctgtaaccacttcttatgcctcctacccactgaaacaaaatcagaggcaaacagagcttcaccctagaaattggggaaaatgaggaacaggttttctgcacaaaagtttatttgtttctcatttctttttcagaaaataaaggatcgctgttgttcccaacaggtttgtagggaagaaaattggagaaacattattaccttttcttagatgttggcaacggaggcaacaaggactgcaaaagaaaattgtgtgtcccccattcctaaataatcaaaattggcagtagggatggaagagcattggggttttagggctgttagggtttcatcaagccaatgtattccctgccagattttaaggagaaaaaggcgctggaaaattgagtgatgttagccccctttcttatttttcactgctaccaaagactaactctatctctctccccaacccttctctccatctccctcctttagatgtgtttgcacagaagagtgcccagtgaagagacctactccttggatcgctttgcgcaaaatccaccccttttccctcctccctcccttccagcctccgaatcccgcatggcccacgctcccctcctgcagcggtgcggggcaggtgatgagcctctgtgaactactaaggtgggagggggctatacgcagaggagaatgtcagatgctcagctcggtcccctccgcctgacgctcctctctgtctcagccaggactggtttctgtaagaaacagcaggagctgtggcagcggcgaaaggaagcggctgaggcgcttggaacccgaaaagtctcggtgctcctggctacctcgcacagcggtgcccgcccggccgtcagtaccatggacagcagcgctgcccccacgaacgccagcaattgcactgatgccttggcgtactcaagttgctccccagcacccagccccggttcctgggtcaacttgtcccacttagatggcaacctgtccgacccatgcggtccgaaccgcaccgacctgggcgggagagacagcctgtgccctccgaccggcagtccctccatgatcacggccatcacgatcatggccctctactccatcgtgtgcgtggtggggctcttcggaaacttcctggtcatgtatgtgattgtcaggtaaggaaagcgccagggctccgagcggagggttcagcggcttaagggggtacaaagagacacctaactcccaaggctcaatgttgggcgggaggatgaaagaggggaggtaaactggggggactctggaggagaccacggacagtgattgttatttctatgagaaaacctacttttctgttttttcttcaactgataaagaaagaattcaaaatttcaggagcagagaagttgctttggtaaaagctacaaatgtctaggggtggggggcggagggaagctatagcatagacttggagcgcttccttatactgagcaaagagggctcttggcagagtcctacactcagtccctctgcaggagctatggaaagagtaagttgtgaataatgggagagaaattctagttagctttcccaaatttggttggggccggtgtgtgtgtgtgtggcggggggagcagtctcaagtcttctcaattgttttgagatggaccttggcaactttcctactcctgctggtttagtacttccctgtaccacaaccccaccctttcttctcccctgccatagcagcccttacccaactcttcctttcatcctgaggcaacactaggtagaggaagttttcctagcatctctccatgacagttttcctctgttataacaaacatgacaaatgtgttgcctagaccagtttgccgttagtagcttcagatcgcctaagtcacaaactgcatctggaatgggtaggttggttcaggagaaccgcaggacatggctgtatttcattgccttcacaagttggagctaattaggagtgaccaaaagcatcataattccacattagaaactgcagaaactcttatacaggaagttgtgatgggtgctctagacaaagtgttcttatcaagtaaaattaattcaaaagagttgtagtccactttctgtttacccagatgttcccggtatatttggcagagtgtggaagctctcagtattgactgagattgatattgattgtgttggtgttgatgtgtatattcaaatactacatgtgaatgtgaaatgccatatatctgtttttgttaaagaagataaatattttaacactttaaaatagttcctaattcgagggtttttttttttaaccaggggtatgtgtatatagggaacatggcattttcatatttagttacaatgtttgtttcacctattcagcaagtattgcaggtttcagcggagctcttaaatcatttaagaattgctctctccagtatgctttcattacccaggtgctgcaaattgcttataagcaattctttctactcatctgtctgatttctttaattaatgatttttaaagagtaaagctaatttccctgatcttttgatgaggaataagataagtattgtctgtaagaaaagagcaccatctattgagaggaaggctaacaacagaaggaaaaatgcaagaagatcgatggaagtatttatttttaaaaacatttactttaagtaattcaatacaatgattcacattgaagattaaaaaccaagtttaattttgcagttatgacaataaaagttataattaaaggcctgttttgtgaagggaaaatatgtttctcattttttctaaaagaaattcatagaatcataaactaatcaagctagaagggactctagagattatctatgctaagtaaataaactgaggcacagaaaatgtaaattattttctctaagaacagatagttcattaattcagtgccactaaatctctcctagctaacatattttttttttttattgtgctggcaaatcatgatttgagttaattcgactattaggttgacagagtgggttgatatagcaataataacttgggaataacaaattatccccaaattctatgtgaaatcctgaaggaaaaaagcatgaaacaaaaataccaaagcatctaggaatcctgccatctgaaacataatattttattcccttttattgcttcttgatattttccttcctcatttttctaccctttagtttatgctttgcaatacagagagagccaatagagtggcaactggctgtgaaatgagcagattggtcttattccagtgtagaagaggttgctggttgggtgagttagttttaaaggcattacctctggcctcttgttgacttggagaaacatggtgacggtgcatcttactgagaacatgttattatgctttattctcggtactgaaagttcttacaaaatgcagtactatttgaaaggtcatcccaaacacccacctgtggcaggctgggttttaatcgcagggttaggtaaccctcttggaatgtgactgtgaaacagaaaaatgggcaagttagtgacagatgaagcgacagggaaagcatctggggantgaagcaagtatgtctatttagctgagaacatttaactgactgtctccaggctgcggtgtttaaactacaaaatgatcagttcagggatgtattgtccttgctaaaatgctggatataatgttgcatctattaagtattgaggagaaatgttcacttccttccctatttaaaattcaacaaatgctattgaatgatcaagtagttgcagttttctgattatattaaggtaatatttattaaaatgttttagtacattgagtgaatcatgaggctcagatgactatggcaacaacaacaacaaaaataactgctaacatggacgctgtgattaactctttggttctgtttgtaacaccatcatcatcatcccctcatcaacaacattattaagtagtataacttaaatgagattcttaaacagggctactctaaggaatacaagggaggaaaggagaaactgtaatatgttctaaagattttaagtccagatgttaagtgataaaaatgttatcagtaaccatcacctgaaagcttttttggttttaaagaaaaataatgcttggagaataaccttatgaaaattatcacaaagattttagaaaatgtgatgaaaatactacaaacagtagcaatcacttaaaatgggatgatagtatttcattgtcaagaactgtaaagaaaaaaaatcaaaacaaaaagtaacagccaccagagatgtttcacttttgggaaaatatttaataactgaaccagactatagaattacccataactgcaaaaactaatataatcccagatgtgtttatgttgggaaattctttttccaaggtttgttcatgtagctatgaacatggtatgtacagacactgttgaaaagtggagggctagaaactttgagatttctgtgggctgcgtaaaccatccttccagtaaatttccaatgaagagtgccaagtaatagtaccttcatttttaagattatttcttaatgtggttagataaattctcaatataactaattatcagagaagagcatttaaatacgtgcaagatgttattgtcatttctccttcctaacaagtatttctgattttagaaaaagtcctgtgagcttatacttgttctatatactaaatatttgattcaggtttaaatttaaaaatgatcagttatacttgattgaaacagaagtataagcttttaaacttaatctagattcaggtagctacaaattagtgaacaataatgttttatctaatataaggatatatatgtgtgtgtgtgtatatatatatatatataaattcacacacacacatacatatttgaatcaatttgaatgcatgtcactaaatatgatcattagtaattttcataaaataaaaagataatagtttatttactcaaatattaataaaattcacttttctaaaacccacaaaatatcctaattagaggatggatttaaagtgaaaaacactaaataaaattcagttctcaatttaatggcttacattaaaaaatactaacttaattgcatgcctttcacttagtaagggagagctcctggtacctattacaatttgaactttaagtgctattttccatatagaaactaattcagaggagaacaactcttcttctgtgtcttctaaacacactaaattgcttttcctttccttggttgtaagctgtgtctttgtcatttgcatgacattaccaatcaacgagtttcctatattcttctctctctcttttctttcttgaaagaatgacctatctgatattttatgaaacatctccaaagataaaaaatatataattacagaacaattcttctcttaaaggatggatggatagatagatagagagagagagagagagatagacagactgaaacagttgaagtctcttctctgctcctaataccctcctgtcactgagactaccactatcataaatttagtggtgagttattcacatgcatgtttttaaacatttactacatatggaaacacatatatatatagtaaacatatggaaacacacatacatagtaaatgtttttgtatgttctcataactttttataattggtaccatatcatatgtttaagcttaaacacataatttccctaattactccaagttgttatagttccagtaggccaatgctagaaaatagatgtcaaataaaaccaacaaacataaaagaaaacaaacaaacattcgggccattaactcttctgagtacttttaactgatcttatttttttttaaatgtgttaaaaattatttgtaaaaatttatttgcaagcatttttctaagctaattgttttaattaatatttaggtataatactcagaaaaaaacctcagctactgctgcaaaaaaaataaatcggttaataaatttaaataaagcataatttctctactgctaagaagaaaatacaaataattaattggtgtctgtaggtattcaaataataaatgctgacaatatttactttgagattttgaacatctaataggatctcttacatataaaagttgaaaatattatttctcctaggattccgtttaaggcagtagttgaaacagatattttaaggtcagatgcaagaaaaaataagctcattttgagaaataacatacaactatatgagatttaaaaatgtactagtggtggtcaggcactgtagctcttacttacaatgccagcgctttgggaggctgaggcaggtggatcacctgaggtcaggagtttgagaccagtctgggcaacatggtgaaatgctgtgtctactaaaaataaaaaaaattagccagactgggtggcgcatgcttgtaatcccaactactggggaggctgaggcacaagaatttcttgtacccagaggcaaaggctgcagcgagccgagatcgcaccactgcactccagcctgtgcaacacagtgggactccgactcaaacaaaaaaaataaattaaaaaaaaaagtactaggggtaaataccaagactaaatggtgcatgtcattttaaaatacaagaattccaagtctttagtcctcactaagtttaatgtttatctgactgaaataattatctgtgacagcagtcttcaaacttgtttttagatgtagacacttatttcaagaacttgggacccaatatataaaacagatcacagaacaactgtccagatgtaaccacatgttgagaccaagagcactgctcaccttgcacccccatgccacccaccagtgctgtccccaagggaccaccatagaatttctagggctccaccaggcaaaatttgaaagcaatggctttcacgttgtttcatatccttctcgtgcccacctcatgtccttcacctcgccttctacctcagccgttgatatggcagtcagtttccagacataactgagtaacacttcaccttggctgcatctaaatcacttactttctgccctagggcttctctactggagtaattgccctccataggaatcagcctggcactcacaaaggcactatttggaagttcaggaaagttcccttgaccaggaaatggaagcctgtggaaaaatgctgcccttgctcccctctctcctgaggtgtacaattctgaggtgccaactacaaggcacatcagaaggccccgcccacattgtgaccgtctcaaaaacatgcctcgttttcctcttccctggtttactcttctagtttcccactccttgccaagcaaccacttttcaaaatggttcaccttcacacaaggtcgtatctcacactctgctgaatatccttcctgttattttataattggtgactatacgttagcacagtaaaatctgtttaataaatagagctcttacagacctatcaataaaggttttctcttaactatcaaaaactcgtaagaaaaattctgataggcagcaccagttagaactaccaagagagttcagaagctaagcttttccttccatttttgttcctgccttgggatttaggaaaggcttttttgggtaggtttggctgaatggagagagagtgggcaccagtcatgtccagtgttcagtttacttcttcttgagctcaggataataggagcagaattgtgtgtgccatgtaaaggaaataaagcctcctgtgccttctggcaaattatctgagggtataagaaaacaaacaaacaaaaaatcctgccactcccttttccattaatttcatgttatatagtaacgttaagagtatcttgtgattaattgagctcaagaaaatttcagtcttcaaaagtgagctgaagcatcaaatgcaggaaacgtcatatacaacaagcatcatatactgagcttaccaagcaactcctttctttacccatcctttcttgcctcaggtaactttttttctttccccatcaatttctcagatacaaatttagaaaggaagaacagcaaggaagagaaaccttgccctggctcagggccccaagtgtcagttgtggctcgacttcaaggcactctgcgcctcactctccttatctgtaaaaaggtgcgaattggactaaaaaaatcttaaacgctttctagtactaaaatgtcctatggcaacttcaatgactattaagagcatgtttttcccagcaatacaatctggaggaaaagaggaatcatccacaanactaaacaatcgtggttgccattccatcacagccctttggattctatataagctcaaataggttctgtcaaagggagaaagagtgagtgtgctctgaactgccaggtgtggtgtttatgattaggacaataagggaaacagaaagttacagtcaagcctttattcatatgcttcgagagtacaggcaagtggttaagtgggaaaaggtgcaaccccatcatgtttcattccccccacccccaccccacagaagccaccaggtgagcatcacatgtttgagcagaaatgcaggaaggagagggaaaagtcatcttcttactgcactgggaggcccaagcaaaaggtcctgctgttttgtgtacctgagggcctgggtgcaagatggggaaagacaaggaatgaaaaacagtgagtcagagtatgtgctgcctccttaagggttaggaacgcataacctaaaagcgtgactggcaaaggtggagcgtgggcaaaattctctctctctctctctctctctctctctgtctctcattctctgtttaatttttaggagatggttttaatatttgcctttaggtattagtcctatcctggatgttgtattccaaatctgatgcaaagaggttccaccaaatctaatcaagtgaactttcgtaaaccaatggatagggctttcccataagatgaagtgtgtgatgggtttaaangagagagagatcattctgttctggatatgtgtctgtccaggcaaaaatgttgttaagtacaatttttgtttgtttgttttttgtttgttttaaataatatgttagcttatgcactgtatgtaagtaggtgtcttcgtgtgttcaggctgctataacaaagtaccatagcctgggtggcttacaaactacagaaatttactcttacagtgctggaggcttgaggagttcatgatgaaagcaccagcagattctgcatttgctgaggaccttcttgcagagacaactaacttctccccatttctccacaaggcaaagaggcaaggaagctctctagggcctctttcataagggcattaatagtgttcataatggctctgctctcatgacctaatcacctcccaaaggccccacctccaaataccatcacactggggaataggttttcaacatgtgaatttgaggggaacacattcagtttacagtaggtgtcctaagtgattcaaatattaaccactcatattcactgaaaaccattagtgtgatttaaattaacgtttacgtaaattaggccaacctgattccttcactatcttccaatatgcttcatgtttatctcttctatactgtttcctttatttttctttctctctgttttcctgtaacgtatctctcattcttttcctatcaaaatgtttcttgttcttcaagtatcaacttaaatccatcctttcttacagcctctccaaagtactcctacaaccaatttccctgcaatataacccaaaatacatgctaccattgttaaaaaaaaattatgcattttctcatggccttataaaatgtcacttgataaaacttaaagacttgaactatatctatctctttgtgtttaggtgagaaatccaacattcaaagttgaccaacagaactgaatatcttcaaaatactgtacaattctaagctattagcaattcagatgtacctcaaattattcaagtataaaatctaatttaaataattttctcaattcactttgttcatgcatatttagcttttatcacttgagtcatgaaaagtgatctgtaccatagatacatattagcaaatcataaattcaaatacaaacacatacatgtctatatatgcatatattcctgagtttacaaactttaaaaagggaatatatggttactcttataataaaaactcagaaagtaaaatttgaagaagtaaaaacataaaaagttaatatagtcaattcccattattcatgatagttatggtccataaagtcattatgactacagaattcgtgagtactgaagctttgcttctaggggatatatagggcaggttcctgtgagcctctgattataaaattttcatcagctaatgcattcgtaaccttgttttatgtgtgtttctgtttaaagacgctttatttaatatatagctgattcactaacgttgaactcatggttaacagcactataaatcatgcctgaacaaagcttctgtaacacaagtactttcctcataagccacatcacagtcttcttggcttagggacactaagcagaacttccacactatgtttgagaccattttaaacagtgaagtcaccaccaccaccaacaacaacaacaaaaaaacacagaaatgtgaaaaatgtggcaataaatagattgtgaaaaggacacgtgtttatagtacaagctgaaagaagacagcagagcattgccttgtttgaccttacctgggaacctgcacagagagcaactcaaattttttgctgctctatacatgtccacacaggtcctcaaatgactgcaaaagccaagtattattttgcgggtaaatattaatagattttagtgaagaggccaattttcaaatacagaatcctcaaataatgagaatcaaatatatataaaatgttcctcaaggaaatatttttgaaacactagtaaagaagaaaatcaggaagctatgttccaaattaaatatggtagcaaattcatgacatgatgacaagttgtatgttttattataatcaggtagaatcgtttgaaaacaaaatggattcccatataactcactcatgagtcaccagatacccaaccacatcacacaaatttaaaatatatacagcgcattgattgatttgcatatgttgaaccatccttgcatcccaaggataaatcccactgggttacaaggagtgatttttctaatgtgttattgaattctgtttgctagtattatgttgaagatttttgcattaatattcatcagagatattggcctgtatttttctttttttgatatgtctttggttttggcatcagggtaatactggcctcacagaatgagtttggatgtattccttcctcctctatttcttagaatagtttgagtaggaatagtattagttcttcttcaagtatttggtagaattcagcagtgtagccatcaggtcctgggcttttctttactggaagactttttattatggcttagatctcagtacttgttattgatctattcagcttttggttttcttcctggttcaattttggtaggttgtatgtatatactcaaaacaaaggaagttagtatatcaaagagatatctgcactcctatgtttgttgcagcagcactgtctacaacagctaagatttggaagcaacctaagtgtccatcaatagattaatggataaagaaaatgtggtacataaacacaatggtatactactattcagccattaaaaagaatgagatccactcatttgcaacaacatggatggaactagagattatgctgttaagtgaaataagccaggcacagaaagacaaactttgcatgttcttacttatttgtgttatctaaaaatcaaatcaattgaattcataaacttagagagtagaaggatggtgaccagaggctggaaagggtagtgggggctgatggggggctgggaggaggtggggattgctaacaggtacaaaaatattagaaagaataaataagacctactatctgaaagcacaaaagggtgactataatcaataataagctaattgcacattttaaaataacataaagaatgtaattggattgttactcaaaggataaatgcttgaggggatggatacctcattcctcatgacatgtttatttcacattgtctgcctgtatcaaaacattccaagtaccccgtaaatatatacacctactacatagccacaaaaaacaaatatttttaagattaaaatatatattagcatgttttattttgcatattgaaataaaattttcaaaactaaattgattcctgtatatttctaaaatagaagtttaagtaaaattgtgattatgtaatataagtatgtgaacatcaaaattatccttacaatgtaggatttcatttatctgaagtcttatgcttttttcagtaaagctctaaaacatggaaaggaaacttttacctaataagtaataaccatgctatagctataaaatcacaacaattacttgatatttacaattagcaaactttggaaaaatttattaagccacaaaatccttactctaatttttggtaaacaactaaaaagggctctgcctaaaattgaatggctctaggaccgtgaattagcctgctccctccaaactgagaatggcgaaaatgcacaagtaaactagacattccatctggaaagtaaaatcctattttataccaaaatacttttattagccaacataaaatttggatctaaatgattctgaggtaagactctcatctcattttactatagttagatgcatataagaccccttcattgcatgaagagtgatggctttgctcagtctttcctataagagttacaaagtatttatgcaaccaataagcatatgagaaaaagctcaacatcacagatcattagagaaatgcaaatcaaaactacaatgagaaccatctcatgccagtcagaatggcgattattaaaacatcaagaaacaatagatactggtgaggccatggagaaagaggaacgcttttacactgttggtgggaatgcaaattagttcaaccattgtggaagacaatgtggcaattcctcaaggatctagaaccagaaatatcatttgacccagcaattccattactgggtatataccagaaggaatataaatcattctactataaagacacatgcacacatatgtttattgtagcactgtttacaatagcaaagacatggaaccaacccaaatgcccatcaatgataggttggataaagaaaatatgttacatatacaccatggaatactatgcagccataaaaaagaataagatcacgtcttttgcagggacatggatgaagctggaagccatcatcctcagcaagctgacacaggaacagaaaaccaaacactgcatgttctcactcataagtgggagttgaacaatgagaacacgtggacacagggagaggaacagcacacactgggccctgtcgggggttggggggcaaggggacaaggagcattaggacaaatagctaatgcatgaggggcttaaaacctagatgacaattgataggtgcagcaaaccaccgtggcacaagtatacctgtgtaacaaacctgcatgttctgcatatgtatcttggaacttagagtaaaataaaataaaataggtagaaagtaaatatttctggtttttacaatcagataatctctgtcataactactcagttctgctgttgcagcctagagcaagccatagacaacacatagatgaatggatatgactgcatttcaataaaactttatatggacactgacatttgaatttccatataattttcacatgcctcaaaacattatttttcttttgatttctttcaaccatttaaaaatgtaaaattgttcctagctggaagaccacagaaagaagtggtaggctgggttctgcccacaagctgtcatttgccaaactctgacacagaacatcttaaataaaattttattcttgcagtggtcatgaaataggaacacatcatcttctttagaaaatttgattacatattgtttactacatgaaggcaaaacattttgttaaaataacctagtacttagtaggtgtgtatatttatggggtatgtatatacccacaaaaattaaaaattaacaaaaacctagaccaactcacagtatttttcaacatcagaaaatagcaacacaaatatgaagttaccacaaaccagaacagttgccatagattgctatgacagagcatattgctcttctggaactgaggttgaagttgtgctataataatcaccacacaaaattatctctatttcaccccaggcctccatatctaacccccaaccctttatttgactcagacaatcagcaaggtttattaccacccttagccagtgattaaggagtaagtgcttagaaaatagcatttctgaagaatttatctttattggatatgctttgtggttatcttaagtaagtgcagtttgctaggcttgtcacagtattttcgtcttcaatcttttggaagctttcaggaaaaatggaaactgtcatctgcaaattcatattaacttcttggcaaatataaaatctgtcttccaagatacctatgcctgcacacctgccaccctgcacccactgcatgtgaccagatagtgagtggcagcttcaaactctatgccatttcaaacataaaagctcattgcttggatcttttttcttttctgtctgacttacatattgctcatttaaaaaaaatgttttctgcagctctcagaagttgctttggaaaatgctattacttattctttagaactcagactgtctagctgggtaaaaaggagtgctagggtaggccaaggtattctaaggatgcttataatcccttgacttcttgtctacagttttgttcaatgatttccttaagactcactgaaatctcctccctgcctgactctacatctttaattttgtccccatccatccatatctaaatgactgccctttgatctgccatgctcagaggaaactttctcccatgtacaggaattctttagattagccagatgaccatcaggaaaaagttcgcaagaagagttaagttaaaggagagtttaaactgggtgacatagagtccactgcaaaattttataattcccagactctcttaagcgagaattggatctaaattctagcaaggaacccagacaggataaaatgaataataattgagtctccttccaattaantcatggaacatcagagccattatataaatccccacaatatgcttagacatgtagaagaagagtactttcagatcgtctagtccagtgattctgaatcctggtggtaccttagaattacctggaaagcttacaccggtctcggtggctcacgcctgtaatctcagcactttgggaggccgaggccggcggatcacgaggtcaggagatcgagaccatcctggctaacacggtgaaaccccgtctctactaaaaatacaaaaaattagccgggcatggcggcatgcacctgtagtcccagctactcgggaggctggggaaggagaattgcgtggacccgggaggcggagcttgtagtgagctgaaatcgcgccactgcactccagtctggtgacagagcgagactccgtctcaaaaaaaaaaaaaaaaaaaaaaaggaaacccgcctaaggttaattgaatcagaatctccaggggcagctcctgggcataagtaagtgtaaaagttcccctggtgactctaccatgcagccaagatcaagaaggacaggtctggtccaacctatccattttatggatgagaaaactgagtcctgtttgtgaaaaatatttaacggatctgtccttatattttacttccctgaactttaaggggttatttatagaacaagtagtaaattaaattatcttgcagaaaagcgaaagctcaggatgttttgaaaatttctctaaatttgaccaatcatctctcttcagagtaggcatagtggagtagacagagtagtaaacatgtaatgaaagacatgtttagataaatgcttgagaggatgcataccccattctctgtgatgtgattactatgcattgcatgcctgtatcaaaacatctcatatacttgataaatatacacacctaacacctactaggtcgcccacaaaaatttaaattaaaaaacttgaaaagcagacatgtttagatgtctgccccttactagtgactacactagacacctaacctacttgaatctcattagttaaaccttaataaaggaaaaatagccatattcaacctcacatgggttttaggtccaaatagataagatttggataataaaaaatatgtggtcaactctaaagtgctctgtaaagcttggctgggcgcattggctcatgcctgtaatcccagcactttgggaggctgtggcgggcagatcacttgaggtcaggacttcaagaccggcctggccatcatggtgaaacctcatctctactaaaaatacaaaaattatccgggcaacatggcttgtgcctgtaatcccagctacttgggaggctgaggcaggagaatcgcttgaacctgagaggtgaaggttgcagtgtgccaagatggtgccactgcactccagtctgggtgacagagtgaaacatcgtctgaaaaaattaatgaataaacaaaaaaaaaaaaataaaagctagagagttttattagctcctaattttcttccctcccactgcactcacaccatcagtatgcaacctaccaacactcactcagggcttttgcctttccctaggtcagatatattatccattataatatttctaattacagtttatctttctagactcctaagttctgcagagaagaagctaggttttgcatgagtatcactgtttcttgtcattcttctcttcattcccatcaactccttctacatgcactgggtcattccaaaaccatcgtgtcaaggacatgatgatgtgaagaaaattctaaggacaggcaactgcaactcatttggttccctactgttaagtctttttatattgtctaataaagtgagtaggggaaaaatatgcaaaccagtgatgttcgaacaaaacagcatttttgttacttaaatcttggtgtgaaagaatctcaagcaggatctaagtctaaatgctaactgcatgtgacaaaactcctttgtccccagcagcactgttcatttgaataagaagaaataacttataacaatggcattctctgaacaccagctttgagaatttagggatttctaatttcatccctataaagagtcatcctgacccctgttgagtctgattctctaatcacagtaaaattggtcaaatgatggagctcttttcttttcttttcttttcttttttctttttctttttgttttgagacggagtcttgctctgtcaccaggctggagtgcagaggtgccagctcggctcactgcaacctccgcctcccaggtttgagtgattcttctgcctcagcctcctgagtagctgggactacaggtgctcaccaccatgcccagctaatttttgtatttttagtagagatggggtttcaccacattggccaggatagtcttgatctcttgacctcataatccgcccgcctcagcctcccaaagtgctgggattacaggcgtgagccaacgcgcccggcctgatggagctcttttctgcatgaaggacacattaatgacgattctgtggctatttctaacaccttcacgatggatttttccaggacttgcaatgcgatgtctgtcaacttcctaactcaggacagtaaactctataaataaagcaagcagaggatgcagcagagaatgacaacctggaatcttacggtgcccttgaaaactaagactcttccaagtacagaagctgtgggaacaaggagatcaatggaagggaaggcctctttgtttccgagcattttttcaccgaaatgctgggttcagtgccagtgagaggttgagctttttccgggggagtattaaatgttaattgaaaaacgttgccagcagtataacctgaacatcagagcctcattgtgcctgccaagaagaacaagggaaattattatcaacattataatttcattcttactcagcccccataagctctggaaagaaaaccacatgggctgaataaaattaaatatgagcatgttaaagatccaaggccactgaaattggtagtcctattaaaagcagatagcattaattgaaatccttcaaatagtctttccttctgatgacaaaaggaagccttttcaacttccttataaaataaataaaacacatatctaaggactaaagatattctttttgtccttttaattttatagaactttacatttttccctaaattgagcagtttgagtctcataacatttttgtgagtctaaacagggaagacattgaacagactcattttaaagaaatagactaattttaaagaataaacatgaactacgtttgttgagcactatgtacaaagcactctcttaggagtttcagatatcagtgagcaaaatagacacagtctgactttttcccaaaggtacagtccagtggatgagaaaattaaacaattttaccagttaataaatgccaagaataggactataataactgactttgtgttctttccatcacagtatcagaaaaacactgttctcaaggtttattgccatcaattactatagctcaccttattccatcaccaagcccatcaatgtgataacttcttaatttaagtctttattccatttctcaaattttgttaaaggtattatttatgtctcagaggcaagatagtagtgagtggaaaaggcctgcgttcattttcataaaagaatgaaaaaaagtgctattgaccataatttataagtatttttctcaaagtagatattgtaaaaattttacaaatagtaaggatatcggcacagaagagcagagtcctgtatgagtggaatttgtaggaagaaaatctcaggagtcattcctttcggacatttgttactctcactgtaatggaacgatgaccagtctacttatgaataccctgtcacacgaagacaggcaagagaaaaatcaagccggaagtccaacctgaaactttcacattttaaaaagttttgtatcagttttgtgatatttaagatgtaactatcaaaagagaaattgacactatcttttagaaaagggccactattctgaacaaagaagaaattgtctgcatataaacaaatgcatcacatttccacaaaagactttggtatatttgtcaatgccacaaagcataacttaaaacatataaagcacaccagtgatcatttccacaggagtattattttctcagcaatttagaaacttaaaataacagcatatgaatgaaagaattaacatgctttctacacacccttgcttttatgcatctttaaaaaaaattgtatataaagatatatgccttctgctatatcaaaaaattctaacactattaaaaagatgaaaaatgatgtttggtatagctctcatgtttttattcacacatttgtttgaagttaagttgatattaaaacagaatatattgggtcagcattctagttgaaatagatgaagttataaaatttagctgaccaaaacatttttggaaagataattggtcaaagaagccctttgaaaacagttgtgttttcagaacaatcacaggtcagaatgcatcaattatctttagcccacatgagaaacatctagaagcaatgttagtacagtcaaaacaaaaagtaacactttagtaaatatgaatgcttaatctgggctcatattctaaggacaaataaacatgaacgtagtagaatattggtccctagcaatgtgccttggagaataaattagcacccattaaattggaaacccatagaaagcattatcatcatcaccatcttcattatcatcatcaccgtcttcattatcatcatcatcactgacttttactgaaagtaactacagttcagattccatactaacaatccttaaatacactacattaaaaaattttcatctttacaccaaccattaaggaaagtattaatattttccaactattacagacaggaaaaatagaattcagaaaatttgtgtaataagcccaaatttgtccaactagtaaatgatggaagtcagatttgaattgagagctacattaccctgaaacctaagtgcttaaaaattgttttattcaattgcatcaaggagaggttttcaaaccagttattgagggttcatttggatggctgacaggtatattaaggtagcttttatatcttactttccagaattgttccctaattggcagcctattttccttattgataggctctaccttgtggaaatcggaatgaaggaaatgagatgcctgtctccttgcaagtcaaaccctgcagattttccttcatattaggcggtgacattttgaattgaccttttgtctctaggataactcaatctaggtctgtaattgagtcagccttttaacctggtaaaatagaacccatcaattattagtggaacttctatttacaaagcctcaattgtgatctaaaggtgctgtcataatctgtcctcgacagcatcattactcaatgtgtgactagtgagtgctaataattcctatcaggaaactggtcaagagacagccactctgccaggctcagtgctgaaagctggagatctagtcaggcttcctggatgtgttattcagccaagcactgtgacatttgcatatctccacttacattcatgatccttttttacacttaaaaaaaaaaattccggttttaagaatgcaagctccttgaggacagactgtgtctggtatttttgttgttgtttgtttgcctgttttaattcttttatctcagaacctaacaaagtaacaaatactcatgtgacatacagtagctgaaatgttccactacactgaatttattacaatgttatgttaatgctacatttatttcagccctttgtgtctcagtgttccatttctaatttttgaaagtaacttttaagtcattgttccactgagagctaatgtttcaaagaaacttgaaattcccaagattaaaattattgtaaaagagcttttttaattattttgatgcaaagatattttccaaggttattttctacattcgagttgagaagagaacctaagcccatgaagtgtctgccttttcctcttcccaatttattgccgcaaggaatccaaatgggagaggggttatagcaagataatagtaaccgagaaaaattgaatctagaagaggaattaaatctggaagactctaagaagaatcaatctggaataaaaggtacaactttactcaaggattttatttttgaagcagcactaatgaaattcaagaaaaggcatcctgctccatatccttgcatccctaccctagcgaccaaaacaccagatggacaggctgaaggcagattagctggaattactgccaagtgcaagtaaccaggcatgtcggtggtactccagcgagcctaaataaatagaccaaaagaaccaaaagtacccagcaaagtagtggaaactcccacattttattcatgactcttatctgtaactctttctttgcttctcaaatggttaatggggtcacttatgaaaagtatggaaacctagtccattcaactcccatgccaaattcttcccatagactactccagtccattccatattctttgtcttagaaacagattggaaaagaataaggtatctgcggagacttccagtaaatgagatttttgcttattntatcaatatgatagtctgaaaactgacaaacactgagagaagaattcttagttgtatgagttttttcccccgaaaaatcagtggatttctgcctccctgggagaaaaagatgaggtgacactagccataataacaggagaacaataggggcagaatgcttccctagaaaatgggaagaaagaagtcacaagacaatgtgtcattaagaaatccagattcatcttagagatgtatcccacaaggaggttatactgggtgacacaagaaaatttctagcctctactctgcaccaattatttcacaaatatttaaaagtacaaagtttatgtcaagaaaagaaattcttacttcatggagcagaaatacactggtaataaaatattggcaaatatctcactctcactaaaatgggtagtaaaatttgtgaatttaaacatatttaacagtggtgtatattcacttctggaaactagatacatggcaggctaattggagatacttgatttatattagtttctggaaaactttggggcccaccctaaattaatggctttctgctaccatcagagacaaaatccttggcaaaatgggccaggaacatgtccccagtaagtgaattaaatactttcacagacactctccatctagtagaacaaatttggaataattgcaacattcctgtcacctacatgagcattaagtactcctctcaacactgccatgttacccgcactgcgctgtaacatctaacacaccatttagaaatcgcttggttctggtttgtcaccagacttaggagagatatatctcactgtagaaccagtgcctatcatgtgcttggcaaaaataaaaataagagaggtgttattatggaatactatgcagccataaaaaagaatgaaatcatgtcctttgcagcaacatggatgcagctggaggctattcttctgaggcaatgtatgcaggaacagaaaaccaaataccacatgttctcacttataagtgagagctaaacattgagtacacatggacaaagaggggagcaacagacaccggggcttacttgagggtggaaggtgggaggagggtaaggatcaaaaaacttttatcaggcactatgctcactacctgagtgacaaaatcatttgaacaccaaactccagtgacatgcaatttacctatgtaataaacctgcacatgtactccctaaaaaaaaataatagttggaaaaaaaaaaggtgttaaggaaatgtatgttgactcaatgttgacactaagaagattttatggcgaacaaaagtaattatgaaaatataatgcgttctatgaaaattaaaaacatgcccataattcttaagatgctttaatacataaagctcaataacatttttgtctttagctaggaaaagtgtgaaatgtataactttgatcacgaagttagagtattaaatataacaaaatgttcccagagtttggctgtacttgttaagtttagagtgatttatattttagtttttatatagttcagtgttattcagatttttaaatatgactgtccaatagcataaggaaaaatataattaatcatatgaaaacaagtaaaaagggagaacatttcagaagtagtagatgatcctgaaaagtaataaagtattgcattagagagcttttttactaaaatataaatcaatgtttggaattttcctattaaaagaatagttacataatttgtggctaaaaatgttgttagtgccaaatgactctattccaagtcagaagacaactccatattgatttaataacctgtattgcactataagactaaaatttcaggctttaaaaactaatgggacttctttgctttgccaaattactggtttattcatgaatcatattttctccttacaaatgctattgagttttccacagggaaaggaaaataccttccaaaaaaactctctgactgaaaaaaaaatctcaataagcttctttctgtttcctagaaaaatctcaagtcagcatgattgttaaattacaaataattgtgtaattcttggatggaaaacagtcatcataagtacctaattttatataaatcaagatctacaggaactaattgcattacctttatttttccatcaattggtcctaaaatattttggaaacctactgttgcaggaattcattaaatgtcaaaatattcagacatcagcaggtactaagacacactaaaatggataaacagaaatgctcatcaacagtttggacaaatcgaatttgaaattaagtctttatagaccttaattaaatctcccttttgtaaaacttaggagcaatgagaacatccttatttcaatttcagcttcctaaacagtatcctgacatataattctttctaatctgttgtgctattattaaacattccaagtagttaaatctccagaaaacacacacacaaaactacaactgaaacaaatcttaactatccagatattttgcttgcatagcaacaaatatccaggtatttcaaatgcacaatgctaacaatgttaaacatttttgtctttgacaattgttctaaacttcagtactcttctctttaaaatagatacaataatagatacaataatcacggttgtctaagttactactagaatttttgtgaacatcagttcgcacaaacccctgtaaagagttagtaaagcttactgtactttatttattatacagatagcttatgtttcatggtgcatatatggtagcagtgcaatgtagtagtaaagagcattaactttattaaattattaaactttattaaatttaaatatgaatttaaattctgcctctgccattgttattcttttttaaccctaattcatatttttattgattcatgcaacataaagtttccattttaaccgcttgtaagtatacaattcagtggtctgaagtacatccatgtcattgtgcaatcattagtatcattcatctctagaactcatttcatcttgcaaaactgaaactctatacccattaaacaataatacccattcgttctttcctcctcccaaaccctggtaatcaccatcctactttctgtctctatgattttgactaatctagttaactaatataagaagaatcatatattatttatcttttataaatggtttatttcatttggcataatgtcctcaaagttgatccatgttgtagtatatgttaacattttcttccttttgaaggatgaataacatttcattgtatgtatgaaccacatttggtttatttattcatctattgagtggttacatctatgctttagtaattctgaataattctgatgtgaagatgggtatataaatatcttgtggagaccgtgttttcaatttctttgggtatttggatcatatggtaattctgtttttaattttttgagaaactgtcctactgtttcccacactgatatgtcattttacattcccaccaacagtccataagggtcctatacgttcttcatatccccaccaacacttgttattttctgctttatttaatagtaatattcctaatgaatgtgaggaggtgtctcactgtggtttaatttgcattgtcctaatgaatagtgatattttgcatcttttcatatgcttattatccattcaaaaatcttttttggagaaaagtctgaatagactcttgaataagtcctttgtctattttttaaattgggttgtttgttttctgttgttgagttttgggagttctctatatgttctggatattaatcccttctcagatatatgatttccaaatatatttctcattctgtaggttgcctttttactacatggatagtgtcctttgattaacaaaagttttcagtttttatgacatgcaatgtgtccatgtttgcttttgttgcctgtgcctttagtatcatatccaagaaatctttgtgaaatctaatgttgtgtagattttgccctattttttctcttaagggttgtataattttagcttttatatttaggtctttgatccatcttgagttaacttctatacatcaggttaggtaaggtgccaaagttattctcttgcatgtgaatgtccaattttcccaacaccatttgttgaaaagactgttctttctccattgaaaggtcttggaactcttgttgaaaatcatttgggcatgtaggcaagggtttatttctgggatctctactctattccattggtcaatatgtatggctttatacaagtaccatgctgttttgattaccattactttaaagtaagttttgaattcaggaagtgtgagtcctctgcctttgtccttctttttcaagattattttggccatagtgtttaacttaagattccatatgaatttcaggatgaatttgtctatttcagcaaaaacttcattgagattttggtaaagattgcattgaatctgaagatgacattgtatgacatcttaacagtattacatttccaatccatgaacatgggatgcctttccatttatttatgtcttctttaatttttttttttttttttttagacagagtctcactctgtcaccacactggggtacagtggcacgatctcggctcactgcaacctccacctcccgggtttaagtgattctcctgcctcaccctcccaagtagctgggactacagctgtgtgccaccatgcctagctaatttttgtatttttagtagagttggggtttcaccatgttggccaggatggtctccatctcttgaccttgtgacccacctgctttggtctcccaaagtgctggggttacaggcgtgagccacaatttcctttagcaatgttttgtagattttgtacacatctttcacctccttggttaatacctaagtgttttattacatttgatgctatcataaattaaactatttttctaattttcttttcagattgttcattgtgaatgtatagaaatgcaactgatttttatatgttgactttgtattctgctacttcaccaaattcattattagttctaacagttttttttgtgtgtggaatctttagtattttctacttataagattatgtcatctgcaaacatattcattttacttcttttctaatttaggtgtatttttttttcaaatttatttcttttacctattttctctggttagaactctcatgctacatagaacagaagtggggaaagcagccatcattgtcttgttcctgatattagagaaaaagctttcagcctttcaacattgagtatgatctctgctgtggaattttcatatacagcttttaatatgttatggttgattctttctattttgattgttttgagtattttatcatgaaagtgtgttgagttttaacaaatactttttctgaattaaatgagattatcatgtggtttattttcttcgttctgttaatctgatatattacattgattggtattcacatgttgaaccatcctttcattccagaaataaatcccagttgattataatgtataatcctctcaatatgctgtagaatttagtctgacaatattttgctgaggatttttgcttcaatttttataagggacattggtttactgttttcttttcttgtagtatctttgtctgtctttgatgttagggtaatgctggccttatagatttaattaggaagtgctctctcctcttcgttatattgaaaaattttgagaagtattggtatttgattttttttaagtgtttggtacaattcaccaatgaagccatcaggaccagggcttttgtttattgggagatgtttttattactggctcaatctcctattattgatagtttctattactttgtactttagtcttgagaggtgttatgaattgaattatgcaccctcccatcccccccaaaaaaaatcatttgttgaaaccctaactttgatgtgactgtaattggaggtaaggcctttaggagataattaaagttaaatgagatcacaatgatggggtactaatgaggttagtgcattaatggaattagtagtcttataagaattgagagagagagagagatctcctttaagcaaagaggaaagatcacaggaggacacagtgagaaggctgcacctgcaagccaggaaaaaaatccctcaccaggaattaaatcagttagcatcttgattttcaattgaccagcctccagaactacaaaaaacatttttgttgttaaaaccactcaatgtatggtattttattgtagtagcttaagtagactattacagtagtttttatgtttttacgaacttggtcatttcatccagattatccaatttgttggcatataatttgtccatagaactctcttgtaaacattttatttatgtacaaaaactagtaatatgcctacttcaacattttattgtagtgatctgattattgtctattttgttattagccaatctagttaaagatttgccaattttgctaatatttttggaaaaccaatttttgtcttcgttcactttctctatttttttttagtttctatttcatttatctctgctccaatttttccttccttctgctagctttctgcttactttgttctttctctagttccttaagtttttaagttgttaacttaagatttttaaatttaagcatttatacatacaaattttcccttagcactgtttttgctgcatcataaaaatttcagtgtgttgtgctttaattttcatttatctctaagtattttctaagttctcttgtgatttttctctttgaaccattgtttatttaagagtgttcttaattttcacaaacctgtgaattttccagttttctttatgttattatgttattgattttttttaattttatccaattttggtcagagaagatactgtatataatatttatttttttaatttattaagatttaatttgtggtctaacatatagtctgtccttgaaaatgttccatgtgcatgtaagaggaatgttttctgttgttgttgggtagagtagtctgtctatatctgttaaacctagttggtttgttgtgttttgtaagtcctctatttccttacttatctcatctgattattctatcctttgttcagagtaagatattggcactacctccttccctcttcaattctgtccacttttgctttatatgttttttaatggtctgttgttgagtactgtttgtaattgttatatcttcttgctgtgaaacatttattgacatataatgcctttctttgtcacttgtaaactttttttatttacaaaaagttaaattacaaattatttttgcaataatactagcatttataattgtcaatgtatttacctttactgagacctttatttctctgcatgactttggatattgtctactgtactttcctttcaacctgcaagactccctttagcattttcttaaattttaatagtatattttacttaatcccatatatctatattatcatttcaacaagtaatcgatgtaaatttcttaaatcatgtaccacatgatattttgaagtatacatgcattctgggatggttaaatctagctagttataacttctgtaatgaaaacacaacattcactctcagcatttttcaatagtaccatatttcaatattaactatagtcaccatgttgtacaatagatctcttgaatttattcctcctaacagtaattatgtcttctttgatctatataacctcaaccccaattcaccctaaccaccccagcctccattctattctctacttgtgtgagatcaattttgtagatttctcatttgagtgaaataatatggtatttgtctttctgtgcctggcttattgcactcaacattatgtcctccaggttgacccacggtcacaaatgacaggactcccttcttttttatggctaagtcgtatcccattgtgtatatataccacattttctttatccattcatatattaatggacactgagatttattccatatcttggttattgtgaatagtgctgcaataaacatgggaacgtagctatctcttcaacatatttattttgttccctttggatatatatacctagtagtgagattgctagatcatatgttagttgtgcaattagttttttgaagcacctccacagtgttttccataatggctctactaatttgcatttccaccaacattgtgtgaggatttccatttctctccatccttgccaccacttaccttttgtattttttgtaatcatcattccaacaggtacaagctgatatctcattgtagttttgactcgcatttccctgatgattactgatgttaaacatttttttcatatacctgttgaccatgtgtatgccttttgagacatgtccatgcaggtcttttgcccatttgttaattaggttatttgctttcttgctattggtttgtaagagcttcttatgtattttggatatcagccccttatcagctgtataatttgcaaatattttctcccattttgaatgttgtcttttcactctggtaatttgtctcctgcagtgtgcagaagctttttagtttgatgtaatcttatttgtctaattttgtttttgtggcctgttttattttttgagatggagtctcgctctgtcaccaggctggagtgcagtagccagatcttggcttactgcaacctccacctcccaggttcaagtgattctcctgcctcagcctccccagtagcagggattacaggtgcatgccgccacacccagctaatttttgtatttttagtagagacagggtttcaccatgttggccaggatggtctcgatcacttgacctcgtgatctgcccacctcggcctcccaaagtgctgggattacaggcatgagccaccgcgccgagccctggcctgtgcttttaaggtgatagccagaaaatcattgcagaaaccagtgtcatgaagctttttcctatgttttcttttagcattttcatagtttgggggtcttacatttaagttgctaacttactttgaatttatactttatctggtgaaagataagggtctcattttattctgctgcacgtggaaatccagttttcccaacattatttattgaaaagacttccctttccccattgtgtttacttagcacctttgttgaaagtcactgagatataaacttaaggtcttctcaggcttttttctggcctgtgcctctccctcggcttgttagtgactttctgattttccttgtatatgcagttgcttttgaatatcctagtctttaatgtctgacccccaaaaaaggataagaaggaaaaacaaatgaagtaggggggaaatggtcctggtaatttaaattccctggaagttgcttcagctatagggaaagaaatttgtaatattcggaggtgagggggtacaacaatgactatctgcctttgtgtctgccttccatgatcagaagcaacagtcagcactcagaacacaggttctgctatttggatgacatggttcttattgcctaccctggctcccacaagctgcatgcaagctgctcctgcagctcatgcactgcctcccaccaggctcgtgtgggagatagaaaactgttagccaggtaagagcagaaattaaccaaaataaaccaagtttactgtcaagcattcccctggaagttgcaagccttccacaacactccaaagttcaaaaatatttacaacagacagactatgccaatgcagtttttatctagatggggagacagattcttgatgcttctactcatccatctgcccagaatctttgccactgttatttaagaggtgcatcttgaaaggctgtgatgaagatcaagtaagaaaaatccaagtaaactctttagagcaatgcctggcattcaacaaatgttggctctaattataatgctcaaaaacagtatctatctccattattatttaatttgttttaaagataattttttggtaatatcttcgccactttacatttatggaaattgggactcagcaacttgactaacatcacagacacagttctcagatttatatatcctaattccaaacccaatattcttactactagaatatgctggaccgttttactcctaacttggttaagaagccaaatataggaggaaattaacaaatcaaggtagttttagttactcattggtctgtgggttcacagcattttaatggagccaactttgctcttaagatgagtaagcagttggtatgactcaggaatctctaagaatgtttctaccttaaaaggcaggtttttgtttcttaatcctttaacaattaatattttaattaagggaacattggatagacattgtaaggtgcaaaatacctctagaaggtattgaaaatactcactgtaagtataagccatttgattacaactgagcaagcaggtcttcactttgataacttctagacctaaagaccatggttaactgatatttgaaggtatggaatgcataatatggaaagagacttaacctagatcatggtgaagatccagctaaaggcacagtgtgtagtcatagctgctgaaggaaggaagcagctcattaaaaaggtgagatggtatccaacactagctttcatacccccaggtctgcctgaggtgggtttctgcctgctacagatagatgctggataagtatatatgccaagatttcagtgaggcagcagctgatgtagctacaatgccccctaagtggcctgtacccatctgtcagcatcactggaaaatgtctaatgcttccctctaattgctgatttttgtcagcttgctcatcatgaagcctgatcctcatttgttatcttcaagtacactctattatccatgctcaccagcgaaaacccccaggaatatccctgtagttttaaaaaaaaaataggtgtattgatcttgctacagcaaggaatacaaaacacccagggatttcagtttatatttggtgatttgggaaaggattcaaagaaacaaaggtctatctagacagtgtgctgtcctaaagcaagagaaatctgatgaatgagcatcagtaattttttatctaggaggaagaattaagcatgtaaggctagagttgtcattgagcagtggtcaatgacaataagaagcagtggttacttaatgttaaccaggaaagggagatgcttggcatttttatggttgtgggtgattttggttttatctcttttccaggcatggttacaaagttaacttgtttttgtcttgttgcatcacatcatggagagtcctcatctgatgtttatattctatggaattttgttccacagaggaataccacagactgatggttagcaaccaggctgcttcccaaaagctgtcagggacttttttttggtctttctcgcaattactcaactattatatactgtcccttctccttctttggcaataggagagggataaaaatgagaatcaacgtgggaatggtaagataacaagagctgggaaggtatggtttattcttattggagggaaatctcctaagaatgtgagatgatcaggaatgtcataattaaacaaatatataaatgtggccgttaggatcaagagaatgcatcatgttgctcaggcatagcaaggtaggcagttgagtgcagattgaaggtggtctctgaactccagaagcttataaaccaatagataaaacagatactactactataatcatcacatatgttacatagcactaagatttcatgtgcaagaatgcaaaaggttgaaatgtattttcaaattcattgatagcacaagatttgcttttattcaatactaaaactaagtacttgcttaaagtgaatgcaatctttcattttcaagatagctaattgagaacaagcatgagactccactcctggtccccaagctccagaacacaatagaaactattttttagagaatataaagcaataaatcaatggacagtcatacattagtttatgaaaatgacagaaaaattcttactaaacaatgtgatattttaaagggccctattaaaggttattcctgttttctctgccattttgaaccaactgagagataagacaaaatgaattaacaacgtcactactgataaatatctttatgatggaaagttgtgcagtaacaatggcttcccaattctaatcccagaatgcagcatactcaaccacctgattgcctgcttgaaccactggtgacctctgcacacggataccagcccctttaaaatttagaaaatagagtacttttatgttttccttgggaagctgaatctcaaagaaagagagaaatggagaaagctatatatatcctattctttaaacatataaaatagctaagtcactcctccttttgaaaggagtgaataatggaactgagagaaatcaaagcagagaaatggtggatgactttactcatgaaacatgaactcagaagaaaggaggttctcccattgcagataaactaagatgctgaaagaatacctgaaactaagaacagccaatataagctgcaggtagtggagcaaactccactgatgttccataatgaggcagacttccacagtggtagcaggcatgttagtttactcttttatatcttccaggctagacataagcaacagtgtcctcatgcatacttagggcagagatactaggctatacctgggaaactagcacttctctacaggattagaaggaaagataagtaatcgaaatcagatgaccagccactaatgtattatgtctactgcaagccatctcatcctctgtttttattgaaaactgcatagtgtgtaaactcaggagctaattctaacctttatccccagccaggctgcacaagcagaagcagtgaacagtctaccagggaatattaacttcaaggatcatctcaaagccaataatcatcacactgttgaagagtgactgcaccaggaaagagacagggcagcagtgggaacacagcaaacagaagaatttacacttgaggaaacagaataaaaaagcagtcacacaaggactttaaaataagtcatatcaggcatggtggctcatgcctgtaatcccagcactttgggaggccaaggcatctgggtcacttaaggccaggagttcaagaccagcctggccagcatggcaaaaactggtctctattaaaaatacaaaaattagccagtgtggtggtgatcccagctactcgggaggctgaggcagcagaatcatttgaacctgggaggtggaggttgcaatgagccaagattgtcccactgcactccagcctggccaacagagcaagaccctgtctcagaaaaacgaatgataataagtcatattttacatcttcagatagataaaagagagaattttttctatgaaataggaggaagcaattcaaaaataataagagatggttattaacaagcaaagcatagcaaccaaattcccagacaacctgggtttcaatcctggctctgacaacaatcactagttggatgtctccagggcaaattacttaaccaatctgtgtcttcattttttcatctgtaaaatgaagatagtcatagtatataccttatatatgtggtatgaggattaaataatttagcattagtaaagcactctgaacagtatctgacacataagtgtttgttaaataaacgaacaaattggaaattctaaaaataacaactttaatttttggcgttcaggattttatgggtgagccgaaaagcagaaagagagaaggcgaagagcatgttaatgagctggaagaacatagaaaatgggatggaggccaggcacagtggctcacacctgtaatcctagcactttgggaggccgaggcaggcaaatcacctgaggtcagaagttcaagaccagcctcgccaagatggtgaaacacagtctctactaaaaatacaaaaattagccaggcgtggtggtacactcctgtagtcccagctacttgggaggctgaggcaggagaattgcttgaacctgggaggtgggaggttgcagtgagctgagatcataccagtgcactccagcccggaggacagagcaagactccaaataaaaaaagaaaagaaaaacaaacagaaaaaaaagacaagcaaagaagaaaagaaaatgggatggaaatggagagtatgaagaaacacaaaagatactagaaggatagacacggaaaaactaaaatgtatctattaaaggtagagaacaaaagcaatggaagagaggcaatattggaagaaataatagccccaaacatcctataactaaagaaagggatgagactgaactgatgtctctgtgttccaggcacaataaatatttttaaaaattcttgccacattttaataaaattcaggaacatacaaaagagataagattgcaagtactataagagaagagaaaatgatatttttaaagggaatagaataagagttttcatcaacacacttggcacaaagaagacaatgaatagagtaacattttcaaagtgaacaaaaactactttgaaaattaagccaaactagctctcttagaggttacatcctcaacttacactagaaacatgctttttagagacattgaagtaaatagcaaaataatcagttacaagtattgaaaatgatacggtgagcaataggaatgagacaaagtaaaaagaactggcatttttcattacaaggatgaaattatgtttttgtacccttttcatagagattaaatctgttttttatataaccaactaaaataagcactttttttttttttttttccagacggaatttcactctgctcccaggctggagtgcagtggcgcaatctcggctgactgcaacctccacctcccaggttcaagcaattctcctgcctcagcctcccgaagagctgggattatgagtgcaggccaccatgcatagctgatttttgtaattttagtagaaatggggtttcaccatttgggccaggctggtctcaaactcctgacctcaagtgatccacccacttcagcctaaaataagcatttcgagtgctcctatgcagagggcttgaagacttggaagactcaaccccacctctgagagacttcccatctgttagagggaggaagggtggaacagtgaacacatctggggaatcccagtctgtcatttactggctttacaagttgagggaagggagctgatctctctgagccttagttttcttgcctgtaaaatggggatgatgaaatgcctaccccatcaactttatgaattacttagtgcaatacttggcatgtagacaacattcattatcattactcttcttctcatgtataaggagatgctcgaaaaggctatctccatgtagtaggattttactttatttttatgttattctttgtattttcctgtattgtgtatttatacagtaagcatgtattatttttacaaagtttacaaaatgcaccctgtaaaagaatcaatatttttaaattatcggaagaaaatttcagagatcatttttaataacctcagaataagtaagacctttacgaaaaacatgtacaaacacacccaccacaggtagtcaaaatgtaatactcctaagggacaaaaacactatgaataaagttaaacaatagcaatctttgaggaactatttgcagcatatatcttaaatttttataaatcagtgagaaaaagacaacctaataaaaatggtcaaaaaataaattcatagacgaggcagtacaattaacccagaaatagatgaaattattttcaacctctaattagtatattgttaattgaaacaatagtggcatattacctatcattcataatattggtagatatggctagacacggtggctcacgcctgtaatcccagcacttttggaactggtcatcaagaactccaaaatctcccctgtaagaaccaccacctttcagaccagcacctcttcctttccagatcctgaatctgacacctcccccaaaactgagctcttcaatccatcatcctaactccttttttataaactacaaatctcaaatgagcacctaatactgccaagcaaatgtttctttgctaaatttactttcctgttctcttctcttctagatctctcacattttcttctctatcatttcctttcattgatacttccgggttttattttatttattcatccaacaaatatttattttgttcctttccaatagaattcaggtccatgaatgtggattctttcttgaagttttgctgaaaagtaaaatagaaatgaaaattataaaacataaaaaattgcggttaagagagggctttcaatgaaaaaaaataaaagcaggcaaaaaagtcctcaatagatctacaagccttttctgtatctgtgcccatattttcagtcttcatgccagtaataatcaagaagaggtcaaccaatccacatgtgctccaaaccccaccccctttcagtttctcagggacattgcacatactctattttccctgcttcttcaagtttccattgctacaacataatttaatagcacacataaattctctagtatatcaaatcataagggggtggtttctgggatttgttttgttttgtttttagagacagagtttcaccatgctcgccaggctggtctcaaactcctggcctcaaatgatgtgcccacctcggcctcccaaagtgctgggattacaggcatgagccactatgcccagccttcaagtcatgttttttaaaaaacaaaataaggccgtgtatggtggctcacgcctgtaatcccagcactttgggaggctgaggtgggcggattggttgaggtcaggagttcaagaccagcctggccaacatgctgaaaccccatctctactaaaaatacaaaaattatccaggcgtggtggcacatgcctgtaattccagctacttgggaggctgaggcaggagaatcatttgaacctgcgaggcggaggttgcagtgacccgagctagcaccactgcactccagcctgggcgacaaagtgagattccatctaaaaaaataattaattaattaattaattaactaaaacaaaagaaattctttcttgaactcacatgtctctctttccctcttcataccaaaatatctctaaagagttttctaaatcattggcttccagatcctcacaccccatctacttttttttttttaactcatatctatttatcatccaaccctaccactccaaggaatttgccaaggttattaacaggtattttgccaaaggcagtgaacatatttctgttactcagtctctctgcattccgcaaatttgaccactatagacttcatgataatctttcctcttttgatttccttaaccctagctctgggtttcttgcttaaattctctggccattccttagttcctctacctttctcagagctttaacctagtccctcttctcttctgtgcatatactttctccttaagttttcttcctcagttccatgctttataaactacccatatgtcaactactcccaaagtcacactctagccctgtcctctcttctaaactccatattccaactgcctatttaatttccttaccagttacctaataggtacttagcaaaaataagaaataaaaataatatccattgcatatattccctttcagtaattcctttttatactgcaggtctgttacccttaacaccagactatgagagtaagcctgtattcccaagaaagggaaaaagaacccacagggagagcaaatgactgtcaattccattatagaattttgaaagctttagctttaaaatgcaaaactagatgatgaaaaaggaaaatgtttttaatgaattctgaaatcttggacttaattatgaaaaacacatcctaggctgcatgtggcagctcacacctataatcccagcattttgggaggccaaggagggaggaccacttgagcacaggaatttgagaccagcctgggcaacatggcaaaaccccatctctcatctctacaaaaaatacaaaagattagccaggcatggtgatgcatgcctgtggtcccagctacttgggaggctgaggtagaggatcgcttgaacagaggaggtcaaagctgcagtgagtcataattgtgccactgcactccagcctgggcgacagagccagaccttatgtcaggagggggaaaaaaaatcatcctaaaagactaaaagaatatggcttatgccataggccatagattagaaaataaaagctggtgaaaatgttgatgttcctgccacacagagaggaagagaggagagaggaaaacgttctgggctggggaaagacatttgagaggataggagaaagagagcaagagaaatcaactcagtgtgagccctgcctttaccaactgatcatctcattccctcactccaggaaaaactctttatggggaaataaacaaaaggaatccaaaacagtaagagatgtgacctctcgcctgactggaattctggagacatttcacagggtgccccagggtcccctggagtagctagaggggagtagaaatctggccaagtggcactaggcaaagagaaactgagatgatcttgcaatatgcaaaggagacccaaaatggggtagaggaggtcaatggagttgggaaattttgtgccagccagaggcacctgcactgcatgggggaagtgagccctctagattcctgtggcagaaatccagggcagagaccagagagataatcaggctcagtccaggaacagctctgagagccagagctgagaagtgagcaggcaggggctcgaaatatgtgggatgaggctcaagactcatacacactggagtgctctgtaagaagacgatagaaaatcacaagtaaaaataagaaactaaagcagataattcaatggaaaaatcatttagaaatataaagtattaaaagttgacaaataccacaaatatcacaaaatccaaaaaagataatcttttaatttatctttttaattagttttcattttttagaggtgagatcttgctctgttgcccaggctggagtgcagtggcatgaccgtagctcactgcagccttgaattcctaggctctgtggatcctcccaccttggcctcccaaagagcttaggattacagacgtgagcaactgcacctggtcagaaaaataataatatttttgttagttaactccctgccatacctctgtaatgctttcttaaatggtaggccgcatactttaggaatgcctgattatttgataacaatttcagattatcatattctatatggaaaagggaatactaattagtttctctagcatggttaatgaaaaatttatttatttttattgatattttacataattttttagtttgcaaattgatcctggaattctcatttaaatgtttaagattgtcacatttggggacatttctatcaagatcatttcttatatgagctataagatttatcaggaaagtttgtatcacataagtgaaatgtaattcaatatgttaagatgcatgaaatatgtgatttcacttacaaacatactcatggctatagtactgcagcaaacttaacgccttcaaatgcaagaatcctgataaattgtatttcagacgattgccatgaaaaagttatagtccatgaataattgcatgttacatgtataatcagctatagtcagacgagaattgataaaaaccagatcctctacttacaaaaatgtgtgtacgatgattaaaaaatttcccacagattggcttctacctctgacatttcaaacctcatttctctcacactcacttatttctgacgtagcctgcaaagtgcattcctatctttcctccctgtctcgctccctcttttcctctctgtttttttctggaacttgatccttctctgccttcagcattctttccattctgcatcacagcacagagccatcccatctgctcacatgattagaatcatctagagtctggtgacccgtacgtgagtggctccggctaaactgtagacatttccaatggcttaatgaacagtctcctttgtcccacaacaccatacatccaaagtgtcaacaccaaatctacttttcctctctgccttctctgttagacaatgatattatcatctatccattctcccatgctggaagtgcagaagtcacattacatccttcttttattccctccttccaaaaaataagtcttgttgatccttctttctaacaatcccaattctccatttgttgtatctttgtaagtgacgtcactgattattgcgttgttctcattgtggtggtggtgggtgaagaggtgagaaagaataagtgtattttgagaagtattgtctctgagaaaccaacacggcaagcaagcacagatgtccaaacaaaaggagaaaatgtagtcaccaaactgggaacagagaggttgtgagtcagtttacatagaactgataggttcaaaccatggattgtaagaaaataaagcaaagggcctggcgcggtggctcacgcctgtaatcccagcactttgggaggccgaggcaggcagatcacgaggtcaggagattgagaccatccttgctaacacagggaaaccccgtctctactaaaaatacagaaaaaaagtagccaggcgtggtggcgggcgcctgtagtcccagctactggggaggctgaggcaggagaatggcgtgaacccgggaggcggagtttgcagtgagccgagatcgcgccactgcactccagcctgggcaacagagtgagactccatctctaaataaataaataaatgaaagaaaagaaaagaaagcaaaggatatggaaaaaactcagctttcctttaaacaactatgactgttacagcattcactataacgagaaaatgtctcaagatttccaagatactctcagcacagtcatatttgaaaagaagataagaaagctttgcatgcctacttcgacgtggtcagagaggtggaagagtatttctgggacccattgcttacaacacaatcagcaatgcactcctagaaatacacgtggcccacaatacaggctagactcctctttagtttcagatggagtctagagaaatgggagaaaagcctcaaatacttgtaactctgtgtgcctcgggtccttcaccatcaagcaaaggtgcctctttgcttagtttcatagaggcctctcccggtcttctctttttgaggcaaactagcaagcaatagttcctttcctgcagcaggattcagaggtctgctatcacccctcgttctcttagacaatgtgatcttgaaagtctcattgggatcttctcattattccatgactttctatgattgaagttctttttaatttgatagtgaactggcacagcaaaaacaaatattccctcttcagtcttacttcaaaaattgctggttctctaagaaaaaaatgttttgtcttacacacagaaaataaaataacccaagcccttatttctttatttaaattccattcaacaagcatatgctggtgcccatcttgtgctgggttctatgctgaatggattatttttttctattttattttgttaaattattctatccatgttatttttcatattttacttatattgagtgattacatgtacaatgtcattaccaaaagtgtatattaagcctcatatttgttgtactaagcgcagtaaaaaataattttactagtagtctaaactttctagaaatttaaaatctacagcatatgtttgcacttctacaaaaggtaattttctaatattgataatgatgaaattgttttatcatattttgaagttgtcttctttgttgttccttccgtattaaagaaatacctagggctatactatgatttgaagtcgctagtaatgtatacttgatttttcatttataaaattcccagatcataaaatataagaaatgacctttccccttagaagttataagtttgaaagctaagctatttctaagctctaaatatcaggttcttagaataaaagcaaagcagtattctctgtaaaccaaaaatctctagctcctgagatggatgctctgatgctgttttcaaagtctttagtccaaaaaaataaatattctatatatttgcaaacaaaaatcaaagccacagataggaatatttcatctagttataactgcttatatatgtcagagaatataacatagtaacatttttctataatacataaatactatttatcacagaatacagaaatcagagaagcaaaacatgtcatttttatataaacttctgatacgtgctatccatgtcctgaagtaaaattttcagaaatcgaataatgcaggaaatgggcacttccggaaagcataatacaaaaatgggaaagcaaggtctcttggctataatggaagtatctctcgttccatttcctttcctatacccagaggagtagtgcaatgacattcggccatgttctctcctcaccctccaacccagtttccaattccaaaataagaatttgaagagctttacaaaagtgcataccagaaaacaagagaaataaagaagaaggcaggccaatagaaaccaagagagaatgaaaccatgagattagcaggagaggtaacacaatagaaatgtatgccattagcttctacacaattattatggggatacacagattttcctctgatattttaagcaccaaatgcaaaaataaaaatacaattagttattcattttatattttctatatacaaagttcatcatggttctgagaaagcaacttccccttgctctgtctgaaagatactcatggtttgtcatcgggggacccgaaggaagaagaaagcagagaagattgggagaggacaaaagagcgagaggatgtggagagaaagggtgacatgctaccaagaagactgatagtcagccgggtgcgatggctcacgcctgtaatcctggcactttgggaggccaaggtgggtggatcacgaggtcaggagatcgagaccatcctggctacgacacggtgaaaccccgtctctactaaaaatacaaaaaattagccgggcttggtggcggacgcctgtagtcccagctactcggaaggctgaggcaggagaatggcgtgaacccgggaggcggagcttgcagtgagccgagatcgcgccactgcactccagcctgggcgacaaagggagactccgtctcaaaaaaaaaaaaaaaaaaaaaaaaaaggaagaagactgatattcatcccactctggtgacacacaggaatggaaacggccacttgccctctggatggaaatgcctctttgcttaatttcatacaggcctctccccgtcttctctttttgaggtaaactagcaagcaatagttcctttcccgtcgcaggattcagaggtctgctatcaccactcttttcctttgctgatagtagcttattagaaatgtcattaactacataacgtcaccttgaaataaatgtaaattaaatgtttcacaacattttatagcaaagtgagaagtcctccattctccccttcactaagctagtggagaatataatacaaaatagcaacctaatatatagtctttctccatgttaatgccaatgagaggataatcactagttttgattatgctttttcttattttagaacctccccccccaacagacagacagacacacacacacacactcacaagtaaaaacgcacctgggatatcagaatggaatagatggataataatggatcaattaactcaggtagatactcatttgaccatattctttgcctaaataattacttgaaatgtaggaaagtatctttatctcattggattgatccaattaaatatgagtattaaagtatgacactctagggaggatttttttctcgactaaaaaggttaatttctatgtgagggtaagtggacataaaagtcatggcaaatgcaagaaatatatctttccaagcacattgctgaacatataaaaggggcttgttgaattcttactgaattaggtatctttcttcacactacttggtaaaaaaaatgaaaaggcagaaaaattagccccaaaagagatgaaactcttccgtccatcaccattgactctattgtgaacttatgaaaaaggtagttgagcaatatgaaggccatgatgtggaattaaacacacacacacacacacacacacacacacacacatgctggattctaaaatgtgtccttcctcctctcactctcttgatcagttttatttctgaactgagacacgatcaccacaattcaaataattaaccacaaaactaaacagaagtttacaaaacccatcaggtgtacagaggtaatttatttagtctggcttcacttaacacaaataggtcaaaagcaatcacattttgtaagtagtaatagttggagaaatgtgtgaagaataggtcaaaagataaataagaattattttataaccataagaaaggaagaacatctataaacaaaagtcatatatgcaacataaaagaataggtgagctgccagcaaatgggcctcacaatgccttttccccaacacttctggaagttccataaaaatcactctaatgggtcaaacatcgatggttctcagaagaacacaatttttttcaaaaacgaatagcattgtaaattcatttgaattcataaaacaaaagagctatttaatcatctagaccaaagttaaagaaatacctactacaaaaattttaatgggataattagaaagaaatagcttgggccactgcttcgagcagaagatggagttcagtggctaccataggaagggtcaatatcaggatggcctgtgagtccagatgagtctctctttgcccattttgccacagaacacattcacagcacagtacaaagcagtaggcatggagtaaggaaaaaggcttgtgttttaatagccaggagttctactcggacccactcaggtaaactgaatggcaaagataattcttcctgcaggtcatttcttttgctagtttgctaactctgagtcctatgctcctgtgcaaggcccatgatgtgactctgagcattcattgaactttgctgggacaacattcatgccaccacatcagaacagaatgaaagcttgccctttttttttttttttttgagacagtgtctctctctgttgctcaggctggaatgcagtggtacgattctcctgcctcagcctcccaagtagctgggattgcaggtgcctgccaccacccccagctaatttttctaattttagtagagacagggttgaccaggctggtctccttcccctgccctcaagtgatccattcacctcagcctcccaaagtgctgggattataggcttgagccaccaggcccagcccacattactccttttctgattagaccatctcttcagattaaagcctttgggtatatgctggaggcaattggaattcttaatcctttagctttgtataattttctttcacatatttagaagatcgttgagcccccttttatatgttgctgtgatccaaagcatgagtaactggggtaagaatgctggctatctttagaggaagactttttaaataaattgagaaaaattaaacagcatcattcctataaaatgcccgttgaaagaatttttatagataaatattcacttttttttggtaaattgatgataaaattatgtatatttaccatatacaacatgatgttttgaaatgtatacacattgtggaatggctagcatgctaattaactatgcataaccacgtttcctttcaccatgttgaaccctgacataatttttttttccacaaacacctcactctggagaaggaaatgattttttttaattaaaataaacatacattggaaatacttagtgctaaaataagcctgaaggaaaggttggaagtatgatgagtcagaaaactgactgtaaagaaaccaattacttaacataaaacaccattaaagataagccacgaaatgtaaggtctgctgggtaggaaagtggcaaatgcaatgaagcatgtctttagatcatgcaggtctataaccaanggtgaatctagcaaaagttattttctcttttggggagaaacttcttcttattaaaaaaataaaaaatgtttcaacttcttgagcaccaaggtcaattattctaaatcttaaaaccacagttttaattttgcttttttgttggtttttgtactttggagtatttgtctacattatcctttttatatttgccatatttaaagtccaaactaaaagcaaattattttctctcctcaagttaaatggctctatctttttctttaaaatccattaagaaagtgaaactcccaaagtaagtccaaaaaaaagcccccaagtctgaaaatgtggagcttttctggcagtaatgcagcttctgcaagtattgcagaccagatcaggtatcagaattttaaagcttcagtaacaaagctgtcctattgaccctgaggagatttatgaaatcactttcctgatgttattgaaaccaaaacactttcctggacactgaattcagtcctaaacaaagggcctccaaccaacagctgtcttgggctgaatgagttagactcaacctcgtgtgacggaaaaacagtaaacacaagctaacatttaaaaggaattgatggcaccgtgtaaatcagaagcccaaggagggcctggcttcaggtgtggggttctctctcacgctctcaaatccacatcctccggattaggtccattttcagacaagctcctccagcaactacataccatgcgtcttctcaggtgtgggtcctgcaggaaaactaatacactctttgtccataagtctcaaaataaactctcactggctctggttggaacatgagagcatccttgccattcaccatggccccggtcactaaacgtcttcacgccctggactggtaatacagcctatcccaaagcacctggactgagaacgggaaatgagtggttcccagagtgaaactgaggtactattactaaattaaggtaaatatatgtggaatgttaaaaaaaaaatgatgtccaatgtttacaaggtatacttctgccatcagatataatgtattattgcaagtgtacctgcttatattctactatcatatttctaatttctgcaggccttgaaaacatataacactcctagatacttacccaggaggaagaaaagcatatgtttatataaagacttgcacatgaatgttcgtaacagttcatttgtaacatccaaaagttgtatgcaactcagttcccattaataggtgaatggattaaaaaaaaaaacagatgaatgcataagtaatactacttgtcaataacaaggaattaattcttgttatatgcaaccacatagatgaatctcaaaataatgacactgagtgaaagaagcagcacaaaaaaagagtacatactgaatgattctatttgcatcttctaggaaatgcaaactaatctataagaacagaaagcaaaccaagatcagcaattgcctgaggaatagtgagggttggatatgaggacagggaggggcaaacaggaaagattaaagagctacacaaagacacttttgggagcaattgatgtcattatcttcatcagaggttgacatttttttctgtaaagtgcaagatagtaaataacttaggctttgcatgtcatctgatctctgttgcaattattgaactttgccattgtagcatcaaaacacttatgggtttttaaataggtgtatttatttataaaacaggcaacggtccaattgggtctacacaccatagtttgccaatctctgatcttaattatggtggtggtttcacaggtgtacacacgtatcaaagcttatcaaattgtatactttaattatgcgttatttattataggtcaattccacctcaataaagcattaaaaaataaaaacaaagcaaacacacttgggttcctcatcatggattggatagagtctaatcttaccatggcatacaagttcttcatgtactggcctctcttcttccccagtcagatcccttgccattccctggtagaatgtgcttgacacacacatcaggccattccaactctacatctttgttggggttctctctgttacctctctgtctagaatgacctgctcctaccaagtgtctaactcaatcatcctgcttgtgctttgagattaaacttgcacttccaggatgccttccacatcttactcctactattccctttgccttatgctctgtgagatgcctcatctctgtgccccataatcgcctgtgtgtttgtatgtgcatgtgtttgtgtacatacctatagacacttgcacaattatacttcttgataattttaactatatttatatagctaaaattttctcttttatatttagaattactatccagtcgctgcccctactatttgactggaatctccctctttctattagacctatcacaatgactgacacattacaaaaaaaaaaattaaaaccctcactgcgtgtggtgtctcatgcctgtaacacaaacactttgggaggccgaggagggaggactgcttgagcccaagagttcaagaccaccctaagcaacatgtcaagaccctgtccctacaaaagttttttaaaattaacagggtatggtggcatgcacctgggatcccagttattcaggaggtgaggcaagaggatctcttgagtccaggaggttaaagctgtagtgagctctgttcataccattacactccagcctgggtaacagggcaagatcctatccaaaaaaaaaaaaaaaggaagaaactcaacaaagcagcatcgttgctattattgcagctatttagccaataggtacatcattgacatcattgtaaatagccaagctgatactggaaaacaattctatatctaatctcaaaaaagctttctactaattcatgcaaatttattattggaagcttacctatattttacactagtgtcttttactgattctcactcttcttcctttatctcctagatacaccaagatgaagactgccaccaacatctacattttcaaccttgctctggcagatgccttagccaccagtaccctgcccttccagagtgtgaattacctaatgggaacatggccatttggaaccatcctttgcaagatagtgatctccatagattactataacatgttcaccagcatattcaccctctgcaccatgagtgttgatcgatacattgcagtctgccaccctgtcaaggccttagatttccgtactccccgaaatgccaaaattatcaatgtctgcaactggatcctctcttcagccattggtcttcctgtaatgttcatggctacaacaaaatacaggcaaggtgagtgatgttaccagcctgagggaaggagggttcacagcctgatatgttggtgatgtcataagcaaagcagtatttatggagtgccccattgtcttagtcacattgtaattttaattattcttcctagcaaaaaaagcctttgaatacttaaaaataggaattttcctcataattttaggcctattaaatcctttaaagagaatgtaatctatttatttctgatttctctgtatttacttcataaaaatggtgtgtaaattagtacatagctctcccaagagtaattggagcttaaacccaaagagtattacactgaggcttgtttaaaattatcaagtggctgactacatggcaaatgtatctttctacacctaatatcagaatattgaacaatccatcaaaaaatgaagtgaaaacatccattacctggagccgcctagagactttggacaattattacattttttatatcaatatagacctcatggaggatctagctcatgttgagaggttcatttttgttccctgaacgaaagcttaatgtgatcgaagtggactgcaaaatgggaaatttagaaaaaaacaaaaaacattagaagtaaaactttctttgaaaagtaacaaacaactgagtttcttccacaatttctttatagccttaagttagctctggtcaaggctaaaaatnaatgagcaaaatggcagtattaacaccttatgacataattaaatgttgctgctaatttttcctttaaattcctttcttctaggttccatagattgtacactaacattctctcatccaacctggtactgggaaaacctgctgaagatctgtgttttcatcttcgccttcattatgccagtgctcatcattaccgtgtgctatggactgatgatcttgcgcctcaagagtgtccgcatgctctctggctccaaagaaaaggacaggaatcttcgaaggatcaccaggatggtgctggtggtggtggctgtgttcatcgtctgctggactcccattcacatttacgtcatcattaaagccttggttacaatcccagaaactacgttccagactgtttcttggcacttctgcattgctctaggttacacaaacagctgcctcaacccagtcctttatgcatttctggatgaaaacttcaaacgatgcttcagagagttctgtatcccaacctcttccaacattgagcaacaaaactccactcgaattcgtcagaacactagagaccacccctccacggccaatacagtggatagaactaatcatcaggtacgcagtctctagaattaggtatatctactggggatgacataaaaattataaggctttgtgctaaactaggagtttaatccattatagaggatgagaatggagggaagaggggaagcaaattgtggttctagtgttagagaagaggtttgttatataaactgtgttctttatatttgactgtacatattcatttaggtataaagatacaccaatgagaaatccatgaaactattcaaaataactatttttatggcctttacttctatgcaaaatttatgactttagcacattatagaaataattctgatctagaatccttttcattttccccagaattattatataattcatagatgttgctgcaatacccctcttatttctcaaaagccagtcttgctctggttctgtgattaaagagagagggtgagtgccttgcccactgtggtcatggatgcaagatattcacagaaaattagcatcatggaaaaggagaaaagattaaaaaatgaccatccctaacttttcttaagctattggtttgctacctgaactctagcacaaatatcaaacatattagactgaataatatattattaatatgtgaatattaatctaataaattttattagattaaacaatttttaacagacctcatgcttgttggagataatagggtgaatagcgactagcttttggaaggtgtatttctgtgcccagacctacacagaaaattcaagacttatacacactattataatcatatgggaaatcaacaaggaggaaagagaaaaggctgtctccaagttagtattacttgattaagccactggttggctaaatttgacctctgatctataaaatcaatcaaatacatggcttaatttttaatattaatctaagtaagtaaattttaaataatgatgccagcatccaaaaatcacagcctgtataatttttttaacagtgaattcaaattcaaacttcctatgaagtaaaggctggagtcagaatcttggctaaagttcctagagtcaggcgtcaggactgtgaggacagatggctccggagaaatgaatagcaagtcaaatgattgaggagctaggggaggcctttgccaccacagggtgcagtggcttcctcctgctgtctcttgaccacaccctgtctctcactgtcccctctttaccccactctgccatccagcccagcccaggctcaacctttctaattgaccagaggactaatgtaatatggcccagatacatccgtcatgggcgacattaatcctcatacccctggtattcagtgatgctcaagggaacacaggaactcacaccccctagagagcatgaggtaatgatggcagacccacttccagacaaagggaaattaacttattatgtctcagttctaattccatttcagaaatgaatgccagaaagaaatggttttgactctgcttcttttctctacgtttttttccacatcaagactgctaaacctactccttttactaggagctacttttaaaaagtaattgcaaaaacagcgattacttttgcaccaacctaatgctaagcagccctcctattcagtggctgctagaatcttgtaagtaactttaaaagggcagggatttaaatagattttcaccaacctggggataacatgttaaagattgcaacttaaaatgcctagtcctcagctaaggataaaatattttgctttgaagtaaaatatttccattggagcaaaataatggccattataaagtactgactctttctcctttagtgcctacctataccttccctgtcttgctgggctctagagcaaggctgcttggttgtgtaccctggaccactgcaaggacctcttgtcagatatgacctcccagctatccttcactcgtcctgccttcgtggaaatactgctcccagcccgtctggtggngcatttctcctgagttaagcatgattattcttcagttgcccgacactgcccttgactcccttccaaattcggcattttcacatcagtatggctattgtacagccagatagaagagaaaagaagctaattggaggagttctgttccaagtaactaaaaggtttgctttaaaaatacatccaattaggccttatcttcatcgctgcctctatgaagcagtatcagtgtaagataacagcagaaacacattagccctcgaattggttgctgtcccaaaatgcccaactgagagaactggacacagaagagaggctgccaggaaaagagggaaagatgctctgacatatttaaaaattaagataaatcaaagctccctttggctaatctccactgatgtgtcatcattagaattaaagcagttacaaccagacaactggaacaatacataagctgctagtgatagtttcaataatatatcaacataataaaatgacttgaaggagaaattggagacttgatggctgtgtctataggacatgttaagttagttgtacaaatccagaatgtgataaacaggtgtttggtcgttgtttcacatcatgacccatcatgttggaaaacaaagctaataggatttgcatttaacttttcaactacttgtttgaagtttatattggttgtggatgtttatgttctgccttatgtatttgtactttctttgaggaatatattatactctatatgtcacatttcaagcacattagtcaacttcatattctgcagatcagagatccaatatcaaaccttcccagggtgtctgtattctgacaactgtccactgaggcaatttccatacagcgcaaagtggagtggcgatttggcagttatcaaggtaatttgataagccaatgagaaaattctgtgcccaaaataagcttagagtcatacttacacagttaagagctgctcagtcagcttttgttacattacaaatcattccaaaatgtagtggctagaagcaaccatttatttagtttacaattctgtagaacagccattggagctgggcttggctggaccgttcttccagtattggctgggcttgctcggagggcagctgcccgatgggcgggtggtcagctagctgatctacatggcctcagcaagaatgactagctccacatggactcttaccgtctagcatgttaccccagccttgttctcatggtggtcacagattccaagagaaagaaagagagagagaaaagaggaaagcgtcttttggcatagagtaggaattggcatacggtcaactctgtggttttataggtcaaataaagtcatcctgccaacctagattcaaagggtgagaaattagactccatctcttgctgataggatctgcagtcacattgcaaaaggataggtatatagggagcgaataattatgaccacttctgctaacaatccgtagtaaggacatgctgcatgagacagggaagccattacttcctgagggcaggagccgtgtctgtcttgctctcccaagccagagtctagcacattaaaaagaaagtacttctggccaggcacagtagctcatgcctgtaatcccagcactttgggaggccaaggctagtggatcacctggggtcaggagttcgagaccagcctggtcaacatggtgaaaccccgtctctactaaaaatacaaaattagccaggtgtggtggcacatacctgtaattccagctatttgggaggctgagacaggagaatcgcttgaacctgggaggcagaggttgcagtgagcccaggtcgtgccattgcactccagcctgggcaacaagaacgaaactccatctcaaaagaaagaaagaaaagaaagaaagtacttccaaaacatccaaagcattggacagattcatgtctgttgaataaatgatgagagggctgaggatatttcaggagatgtggcaggcatgaccccttcatcatgcaactgacgaacaacctaaatgactatgtaccctaaccctcttaccgtcagtaatgggaaaatattcaaaataggccttcttccttttctcctcctcagcctttgctactctgatccaatgttatttatacttttcaaaaaatcagttacattcatggttgttttctaattttatttctaacgcgtacttttgataaggagaccaagagattgattcagtgccctaaagaggtctttccctagctgagtatgaaaaaacaaaaaagatggtctcgtgttttttttgtgcatgcctgggctcagcctactgctccagctgtagcctctgtgcctgatttatgttcagcttgctgtctttatgacttttagatctttattaggtagactaaggcataggcattcattttccatctgttctcagtgcaatttaatttctccacacacgccctacactgctgttgtcctattgaactccactttgctttcaaacccttcccttgtttatttcgatcacttcaggttcaactcaaacctgaactgttggccactgctaacctgccttgcccacttggtttccacccgcatcatattatctaatgcattttctttttgttgttattgttgttgtttgtttgttttttgatttttagtttgaaatggaattactctgtcgcccaggctggagtgcagtggtgcgatctcagctcactgcaacctcttcctcctggttcaaacgattctcctgcctcagcctccccagtagctgggattacaggcatgcgccaccacacccagctaatttttgtattatttttagtggagatggggtttcaccttgttggtcaggctggcctcaaactcttgaccccaagtgatccgcccacctcagcctcccaaagtgctgagattccagacgtgagcccctgtgtctggcctctaacgcattttatatcttgacacgtaggtgattattgaaaacgtttagcattatatggggaaaaaagcaacactgttacatcagttgaattatcactgaaacggtagagtttggtgcaaaagtaattgcgggttttgccattactttcaatggcaaaaaccgcaattatttttgcaccaggctagtactaacaaccactataataataatgctgccttacatttatatggcaatgtacagattcaaaagtgcttttatgggcattatcacatctgcttcctataacaactctgatgggtaaatgtaagaaaatgctcagggaagttaaatcattatataagatcaaacagccaggaagaggtagaatccagacaagcacccagggcttcgaatattactccacagcttttctctgctttcctacacaatgctactttgcactcaattattatcacatggtctcagccagattctcaacatttactatgagctccagaaaatgtaagttcttaagaactgctctaataaattatagtttgttatgtgagggtccaagaatctgccttttaaataaaacaataaactgaaatctcttatttaaactgtaccttcatctccaaagtagcacatttactgttttgtctaacctgtctagccatttcagtcaagctgattgacatgaatgttttcaccaaatgagttatgtgttttgtgaaataatgtaattatccttggaaaaagccttaatattctgacatatctacccgtgggtcttacaggaaaaagcaatataatagtgataaagtgaacgtcgtggcatgtcctgctaattcctttccattaatatggcaagtccagtcctaaaccctctaattactattattaaagcactttcttgacattttaatcaaaatagcgggtcaagaagttaggagatgctctgtatttggtttaactgtgaactatattatccccagctaaactaaaagcagaagcctacttttaaaataaaatacatcactctcaaaagttgatctcagttttttttacaagacatctgtggagagttaatttgggaaagtaattgtttcaattcaatgggaaaaaaaactcaaatgagaatagctcacaaaattacagcagtggacaacattaatgcttattttgtgaatgaaatcaaaatggctattctttcagttctacagtttaaaaagaaaatggttccgtgtgtgtgtgtgtgtgtgtgtgcgtgtgatataggcatgtctctttttgcatgtatggaattagagtaaatgtaggtttaaaattaatatttcatgcatagcagaagaaattagtatgtgtttctataaattattgtgatatgtgagagaaaatgttgtttagttaaaaatgtgtttatccctagaaaaatttggcttttagactattcataataacatatattgaccattttgtgtctgggatgggatatcttatttaatcatattagatatggattgtaacctctactctatagttgaggaaactaatgtttaaggaagtaacttgcccaaggtcatagttaaaatgtagtggctgagggttgggtgcagtggctcacgcctgttatcctagtactttgggaggccaaggcaggaggattgtttgaggccaggtgttcgagaccaacctggccaacatagcaagaccttgtctctactaaatttataaaattttaaaaattagaaaaaaaattttaattagtggctaactattgactccagttaaattccatcttataacccaggcttttaatcaatgtgccctgatatattccagtctatttttcactcttctcagcatggtctcagacctgagaaatttagggaaatttagttttaaagattggattaactaaagtggtgcagtatcttcttttcctgactgttctaactaatgtaactaactgaaaaacagcaacatatttttcctttcaaaactaacaaaatgagatgtcatcttatttggttaaacttaagtggtgaattgctattttacagccattttttgtaaaaatactctcactgagatttagtgttttggaacatgtcaatctttattttctacctcatgtagttttggatgctaaatatgaaaaggtgcatatttttctcttttaactttcaacaacaccacgtttatttttacttctacctctatgattttgaaatgcagtttcacagtatttatttttgcttttgcattttctccttcacactaaaggaaaggatatttgaatgtatatgacctatcacaaaccagctgttaacttttggatgtcattctgatcactatatcttttggcaggttgcaaataaatatttgtaaattgctaaaatttgacaaaaatggcaaaattaatttggagagnacattatgagaaatagaaatttctgtggggtgtagaacaaaatttgtcttattgataattttccttttctaattattatttccctggaaatcaagaatccaaagccacaatttcatcagtcctctcccttcacactcagaatttgtttctttatagagtagagtttctgagtttcacgtgaataggaacttttcatgatgaagaaaaaaaattagagccagaccaggtgcagtggctctcatctgtaatctcagcattttgggaggccgaggccagtgaattgcttgagcccaggagttcaagaccagcctgggcaacctgacgaaagtcgatctctgcaaaaaacaaacaaacaaaaaaagccaggcgcggtggcatgcacctgtaggtctagctactcaggaggctaaggtgggagaattgattgaacctgggaagttgaggctgcaatgagcagtgattgtgccaccgcactctaggctgggcaactgaatgagagtctgtcgaaaggaaggaaggaaggaaggaagaaaggaaggaaggaaggaaggaagggagggaggaagagagcgagagagagagagagagagaaagaaagagaaagaaagagaaagaaagaaagtaaagaaagaaagagagaaagagaaagaaagagggagggaggaagaaagaaagagagaaagaaagaaagaaaaagaaagaaagaaagaaggaaagaaaaagaaagaggaaggaaagaatgagagaaagaggaaagagagagagggagagaggaagggagggaggaaggaaaccatatcgtctatgacttctactctactgcaataaaatctcttaaataaagatcatacacatatatacacacatatatatacacacatgtatatacatatatacacacatatatatgatgtgggtaggggaggctagaaacaagattcatttcaaatgttaaattgtaattgtagtttttaaaaacatggagagttttcataataaacatgaagagtttcataaaaacatgagttttcataatatatatcaaatatatatcatatcaggatatatcataatatattatatattatcatatgatatatatcataacatattatatattatattatgatatatatcataacatgtattatcatattatgatatatatcataacatatatattatcatattacgatatatatcataacatattatatattatcatattatgatatatatcataacatattatatattatcatatgatatatatcatatgatatatatcatgatatatatcatattatatattatcatattatgatatatatattatatattatcatattatgacatataatatatattatcatattatgacgtatcataatatatattatcatattatgacatatcataatatatattatcatattatgacatatcgtaatatatattatcatattatgacatatatcataatatatattatcatattatgacatatatcataatatatatcaaaaagtcacagagctcatgcaagcccagtcatccccattgccagtggtgtgtgctaaaggaatacacccataaatattaaccctaactggtgtgagataagtatgaatttaaggtagtgcttgttgctttactgtgtatgaatcaaaggaaattaaccatcttgtctttctataacatctgaacatattagaaacacatgcaaagaaataaatagcctgataaattggctccatatcattatcagataccaaataaatataggctgaaaatttcatcacaatttgaatattggtcctctcagtttaagaatgaatatatagaaaaataatgtgagcaatttgtctgtataaagtgaagtatttcttgggaaagaaggaaaaagagctaatgtatagagcacattttttgtgtaaaatcagctaccatctactattctgttttctatacagacaccagaaatcccaagaatactagatatctacaaaatctagcaatccctacctaggttctttctacttttgtcacattatccaatatttataaaggttaaaaaatatatatttaggagattttataaatataaatatatatgtatatataatccaggattcgtaatatatatttacatattatatatataaatatatatacacacatatataaaattcaagttttctatacctaagtcccttgaagtgtaaaaagtaaatgatttattatgatgaaatggattcctttaagatgtaatagaaaagcaaatcctatgaaagatgatattaagaaataagaataacttaatcaacaaatagcaaaatattttttaaaacgttgacaaccagaaaattcagtgaaaggtggatgtgggatgagatatgactactgtacatttgacaatacaatcatctatttaactcatttcataatttgtcgacttaagaagaatatctcactcttactcttcttcattcttctctattatattagctaaggtgttcttatattcaaaattcctgaagtatcattaaatatgggctcattcaaattcaaaccatcaacttttaaaaacgctctccttgagctactctttggaaatagaagggaaatgggaggaacaattctctcatagaatttttaaatgcttcagctaaggcttgcagtgtgacttgcatatactataataactgaatttctttctgattgcttcagaagttcaatatgacaaatagactttcaaatggctatagtatagcaaatatcaacgtctaaatctcaataatgtaactggatatgtcaagcagatgcaaaatgttcacagttcttcgaacactggaactgaaaaagaacactgcagactgtcttatccaaacatccttttcctataaatggagaaattgaaggccagaaatgtatttttttattgtgtaccttttttcttactaaatgtaaaagatgatagtgaaatctttccaaacacctagttttcaaatagagtttaagaaaatttgtgtaaataaaaagtcagataattgtatttttacataaacatatgtaaatttaattttaaaattttcatcaggttaaggggaagcattacaattagataagaacagcagatgcaagataaaatcctaaaaaattatttattttatttttttggagacaggatttagctctgctgtccaagctggagtgccgtggcaccagctcagctccctgcagcctctacttcccaggctccagtgatcctcctgcctcagcctcctgagtagctaaaactatgggcacacaccatcacaccatgctaatttttgtactttttgtagagacagggttttgccgtgttgcgagcctggtcttaaactcctgggctgaagtgatccacctgccttgccctcccaaaatcctaggatagccaaaatcctaaaaatgtaaatggccccagatcatactactgatgggctgaatgttcttgggcaagtttctaacaatctctgcttgcatttcctcatctgtaagaaaggtaataactgtagtaactaccacttagctttgatgtaagcatgatgtatgattatccatccaaagtgtcaggcaactggctaatattattactcnaagccatccggtgaggctttactattctcatcttcttcttttccttttccctcaaaactgaatttcatctcttgtaaatagcatttaaaaggaatgaaataatgtaccaaaagagatcataaagtggactaacccaagccttctcaaccttggcgctagtgacattgtgggcactgtaagatgttcagcagcatcctttgtctcaacacactaaatgccagtagcacccacccatctcccactgtgatgccaaaatgcctccagatattgccaaatgtctcctggagtggaggcaggcagcagaaatcagtcaagaaccattgatctaacctgtttaattttgttcaatagctggagaaacattaaggtccaattagttgtgatgtttttaaagcaatgcttgagaaaattggaaccaaaccccaggtgtcctgactttagtctgatcctcctctgaaaatttctctaaggaaagctttcctctacaccactaaccagttgcaaaaaaaaaaaaaaaaacactccatactcatggaagacaagagaaaggcacaattcttcaacccttatattacttcaagcttcttttagaaaaaaaatgaccttcagcttgagacactattaagaaaaaaattaaaggccaataaagatgaagatattgttagagaaccccaggaggctctgaatgaggtcaaatctcatggcgatattaaaacattaagaggagttgtggacaaactacaatgaaacacaaatcataatctctgangcaaataagaatggaaggactcctggaaaatgagggtaaagaaatagaatcccaagtttaatgggaatattgtagcaactgaaaaccacagaatatttagctttgtacaaattgtttttagaacctggattaaatcattaaaatgtattttgaaagtacttagaaagaaagcaagtaacctctaagaggcaagttatcattagttatggcaaaataaattttattttcttagaacattactggacccggaaattaggtaaaccctataccaattgtgtttctaacaatagatttgacaagctcttactaatttctgtaatactatactgtgtttatgatctaggtaatagtacaatgaggtaggtttataaactttttttttcaaagtgaaagcaagtttattaagaaagtaaagaaataaaagaatagctactccatagagcagccctgagggcttctggtggcccatttttacagttatttcttgatgatatgctcaacaaggggtgtattattcatgcctcccctttttagaccatacagggtaacttcctgatgtttccatggcatttgtaaattgtcatggtgttggtgggagtgtagcagtgaggacaaccaggggtcactcttgttgccattttggttttcatgggttttggccggctcctttactgcaacgtgttttatcagcaaggtctttatgacctgtattttgtgctgacctcttatctcagcctgtgacttagaatcccttcactgtctaggaatgcagcccaataggtttcagcctcattttactcagctcttattcaagatggagttgttctggttcacatgcctctgacatgtcccccctcccttttgtaagagaacccttaatcctaagagttgcagagagatgaagatccatcttccgtaacttcttcaggctgaataggggcaataatattcctgcctagctattaggggctcttgtgtttagggtagagagaagctcagtcagaaagcatcagtatggcgagggccattcatgactcttgagtttcaacaacagatgatatctggaagattaataaatgtttagttaaagaaaacattcagtcagcttgtcctgtattcctacacaaagaatataataggaatatattccaaaagagtaaagcaaaacaaatgaagttattccaagtaaactaaattagaatgcttttcataaactggacaactgttggaactaagctgatatggggttgttagctgattgtaatgtgcccagaattagaatactcatttagatttttacattacccatccctcttgtttcttctaagcagcagtcagacatcactggttggtttacaggaataagcaggattagcctaaattgcagaaacaagcttaaaaacaactaatgagactagaatttaataacaagtgtaccatagtttttgaaacataatatttctctctctagtttcccatttttactaaagacaaatcatggtaaggctgatttgctttattatacatgacctgattatttgtataaagtgcagcaagaataattatttttcacataagctctttttaaattggctttgatggaatgctgttccacagaaggaatttcaggtaagatctttttaagccaagcccagccatgggtttgtaccctcaaatacctataagttgggtaaatttctttcctcttgaggtcccaaagtaacttcagtcttctggacctgacagaaaatgacgttctttacttaccataggtcagaaaccctgaacagggactgtgtaggcaaggtatgaggccagttccccaagggacttttattggctttataagtcaagtttaattccttaaaggaaaacacaccattccagtcaaagccttggtaagataaacaatttctccaattgtgttgtattacaaaagaaaacagattcttattatgcctatgcaaataactatactaccataagttaagaatactcacaactagtttccaaattctgtagaaatcaggtagacagaaataaatatgctccaaattttgttcataggagtacactcaactgttaaaagctgtaaatagcttaaaagaaaagttttcttgactctgaaaaacaaaacaaaggatcagcaatgttctaagcaaagtttaaaagattagttttctattggtttactgaatttagttaactcctgttttgcttgacattcatgaacattccatgtcttcatgagttctgaaagttgtttcctctattctaatgttacaatttccaaagttatcagaaacttgcatttaagaacacctgttagagttctatagttgattataaatcatcttctaaagaggattaaaacaagacaacaattttctgtggatgacaaaaagttttaggacagccactattaaagccacaattgataaggaaatttgcttacttctgtggcacacagaattttacacaacagttataaataacatacactaagtcatattagaattataggagtttcccataactttggaacatataccagtaacacatttatgcaaatatagtctaaagcaagcaaaacatcatttcacatttgataacacttcctctatgatttttatgccaaataagtcaaatttcaccttttactattaatgctaaacctaagttttaataaaaccttatagacatatttacccaattttaatgtttaaccataaggtaagattcttataaaccttttataaccatttacatttttttgtgtaagagcagatcagtgctctaggaaaaagctattgtgatttattccaatgtttaatttatggaaaaacggaataatacccccttttagccaatatgttcacacacagaatctcttacaattaatccttataaaccttccacagcttgtttaaatctttagatttttttcttacttaaaacaatcctttaacactttaagcagaaaaaattcacattcttatgacttcttataatttttcaccaaaaacacattttactttctttacacaccttgcatgtaagattgtttctttagtagttttaattacatgtgataatgttaactcttagcaacttctatttttgatgaaaaccttggtaaatttgagattttagttgtgtgctaggtgtgaagcctggcccagaacactccaggcagaagtgcagataagagctggctctccagcacagctgagggcatgactaactccgcatgtccccagaccttacctagcagtaaagcaggcaagttgtacggtaagagtcatagtggcattttatgaagcatttaggagtccttacaacctttgaattacacaacatttcttgcataaattccttttcacaaatcctttcatcactcacacagaatatctgaggcatttttggactttctgacttgccctaaacctcccttcttttaaacaaccagttattttactttaggacaagaatttaccatacaggatccttttttatataaaatctctttctttataatcttctttgtatagctagggggcatggtaaattccacatatccccaggccttatctagaatttaatggctttagggtaggtagattgaacaattttcaaaagtcaaagaaacagtttgaccttaaagcatttagcaaatctgatatctgaccttaatttagaccaaatgtctacatttttaagatgttttattttaccaataatctttaaaactgtctttatttccaaaatattactaaagtcatgtgaacaaagaggcataaaatattctatttttctgctgaaatacttcatttaaaggcttatatttctaagccaattaatcagagcccttttacatataaacatacaacacatataaatatagagacagacagaagattcagcacttgtaagattttcatttgccagtttcttaattggatgactggcttgaggatggagtccttggaagaatggggacaggaaaggggtctctggtgcctcctgtttttcccaaggagtccagactgttaagagtttgaatgtccgcttttaattaaactgattttaaccatagcactctttaataaagttcttttagaatttcttatgccaaaaggccggtatttctggcttttgaacttcaccaaaggcaacctccttggtgcttagagaaaggaaaatttcagacagtccgcagaggagaagagaatagacgtcttcactcagatattaaaccagaagtgacttactttctaggtggaattgaacctggactgtcactgtgaaaatgcaaagccttggccactgagctacaatgcagggcagtctccatttcccttcccaggaagagtctagagcattaattttgagtttgcaaaggcttgtaactatttcatatgatttttagagctgactatgacatgaaccctaaaattcctgttcccttgaaggtggagaccaagagaaggtactgccgtgtggttaaaaggtcaagctcccaaggtggagagacttcatccagtttttttgttggtttcagggacctccagccaagtttgttgctgaccaacttgccgggtcgtcttgaaaagggggcttacaggtgttccaagcccgtgttttatcctgaagtatccctcaacacagaaaaacgacctcataacacaaaatacaccagcttaaaaatagcctttgaattatttttcacattaatcaaaactttacagaggagataaacactgatttttttattttattttattttattttattttattttattgccattcattcaaccgtttgcacagagagaaagaagacagaaatctgactggtaagaaattgttacccttttgccagcatgccaggcttctgggttccctttccctgagcggccctagtgatccggcttgcggcaccatcgcctacgggccaagctgcatcataaaggaaatttttttttttcattctggccagagcaaaacacatgtgataaaacataggcattagctactctgcttagcaccaaatatcagactagcttaaatttgcccccagatgggttccatcatctttaatccgacctctgacttgcagtttcaacacgtgctctctgggcaaaacagttgccctgagtaacagaaaagataggaaaggaaaaggagagagagaaaaacgtgccagtggaagggtggggaaggtgaaatgatcaaggaggccagagaaagactcacctattgcagcaacactgtagaagttcaggcagctgcttctcggtagcaaaaggatcttttccagcaatcctattagctctcaagtttccccttttagggaggaaaaagctccccatgtcccgcgatcctgtacatgtccaaccctgccatccacagccatcagcaaagagtgcaagacagattaatccaaagagaatagcaattaatatcccatagcatcaaagctgttcttagccaagagggactttaacgagaggggtctctaacaccctaaatcttagaagagactctaaccatcctaagtagggcctctaaccccgctttataaacttttaattgactcccatcttaacagttgcaatccatggaggaatgcttgataacctcggtgataagataaaaaaccaagcatactagaagtgttctctaaaattaaaaatacagtagttactagagaaaaattttagtccaaaaatccaactatagaaacatagaatgtgagaggtagcacataagaaataagtcatggggattttatttcatggaccagcaatatgatgataaaagccatctaacctgttggaattataggtcacatcaagagaattctagtgtctagaaccaaagaaatgttagcctcactctaatagacaatacacttcaggaacgaaataagcaaattagattgtgttcagagatgaataaccaagatggcagagggaattaaaataattgctcatgattaccctgggaaatagaaggcttagaaaggacaacacagtttcttcatatgcttaaagcaatgtgaatagggaattggactcaaccaacatagcccgacttattaaagccaatgggtagaggttacagagaaagctattccagtacaaccaaacaaaaaaaataaaatgtaagccactttcttgagacatgattgacttacaaaaagatgtatgtatttaatgtatacaacttgatgagtttagaattttctaagctgtgagttatagagattttcttgttactggaagtctaatattcaaacatcagcattttgcctacatgaaaaggacactgagataattcagatgttaagatttgatgattagggaatcagagggaatgaccctttgaataaggttttcagttttcacacgctctaccagcttcttgtagaacactactaaagtgaaatgctaatggtggtccgtgaatgagaagctctatagacaagtgttaggaaatgtggcctaccttattttggtcatggggactgataatatgtataagcatttaaaaggctgtgaaaagccctactctctctccctctctctctctctctctctctctctgtgtgtgtgtgtgtgtgtgtgtgtgtgtgtgtgtgtgtgttgcatacatacacatttcattttctaagccaaagttcagttctccagttcatctgagctcaggcccagtttttcaagggacaccttataacatctcacagaataaaggtttcactaagcaatgtttaaaagccactgtagatcatcagtcccagttaggcatgaatctattcaaaattcaatgtttcactggaataattggcaaggtctcataattctaggcattaatcagaatcctaaaattgattgttgaactcttattcttactcatttaaaatatatgctctaaatacttcagtatacaaaaagacattaaaatttcctatctctgaaaatagagcagggttttcccttttgttttatttgggttttcacttttgttttactttgttttctggtgatattacaagaaaaaaatctatgtacctttggggtataaatcattgaattaaactatacattgctaagaataagcattataattggtacattgttctgtttttgaatgaaatatctttgcagaaaatagatttatttcaaaagtcatctttactcaactgtgagcataccaagggctaataattacaatattttcccgtgaaagaatataagattggaagccagagagcctgggttctgctgctagccctaatggagaccatttgtgtgagtttttcatcccatggcttaagggttgcttatggttgcttaagggatcccttcacaagcaggagtttccgagctcttttgactgctcaagaattaggactcattggccgggcacggtggctcaagcctgtaatcccagcactttgggagaccgaagtgggtggatcacgaggtcaggaaatcgagatcatcctggctaacatggtgaaaccccatctctactaaaaattcaaaaacttagcaggcgtggtggcgggcacctgtagtcccagctactcgggaggctgaggcaggagaatggcgtgaacccgtgaggcggagcttgcagtgagcagagatcgcgccactgcactccagcctgggcgacaaagcgagactccgtctcaaaaaaaaaaaaaaaaaaaaaaagagagaattaggactcatttctgggtttgactgattacaccattcagactccagggccagcttctgttagtggacaataaatgtaatgaccaacgctttctcttgtgaaagaaagatgtattatattggacaaaataagtccatattcacagcagaagaaagcatatggcagatcaagtctggatcttttgaactaccagattattctacctctccttgaattcttctttgctgaagtcggagcccttgtactatagattccatatgtctgattcaggcaatggagcttggaagaggggatgagtttcctattattattatttaggtacatggagatctttgcctatgagtcatcagctcccaaggttttctgtatggctctgtttttatgatttctgtaataaatgagattttgaagcctatttctggctcaaactctgattggcttcaaaagtacccaagcctgttattgccttcaattgtaactttgaatggcatcacaaagagaaaagaaaaaaattgaggtggaggagagtggccacaaaataaaaatattaaaccaactttcctcctccaatgcacctgggcacaccacttcacctctcaaggttatgtttgcttccatagattgacaaggttgaaaagacaatctcttcaattttctttagttccaaaagtgcaggaaatacacaccaacctttgcgtggataaagattaaaagtgccttaaatcagcttccatttgaaccttaaaagcttttcaaacatttaatttttttaaacaggaccaaaaatagcccaagggtatttgctagttgacttcctggaaaaactatagtttatttttatttatttatttatttatttatttattttgagaccgagtctcgctctgtcgcccagctggagtgcagtggtgccatctcggctcactgcaagctccgcctcccgagttcatgccattctcctgcctcagcttcctgagtagctgggactacaggcacctgccaccacgcccagctaattttttgtatttttagtagaaacggggtttcactgtgttagccaggatggtctcgatctcctgaccttgtgatccgcccgcctcggcctcccaaagtgctggcattacaggctggagccaccgcgcctggccaaaaactatagtttaaaaaattgttgacaaaaatagaaaaccgacagcagagagttgtgttacatctatgtatctaacatatgtgtctaagtatggtatctaatgtcaaatgtcaaatctactaactgtactgtggttatcatcagaaaagaaacccagctttagaaaatggtaggaagttccaaaactgcaaaggagatatcttagcaagcaagtagcttggcttttcacaattttatgggtgctagaaatagcatgactcagtggaccagagaaaaccacttattactcacagcacagtaaacagcacaagtatcagcatgctaatgccagttcctttgcctttatgtcttgtgatgtgacaccatgaacccaaattgctgctacacatacaatgagttgcacagcagctgaggagttcagagatatgggttcagtgtcttttgtagcaagcagtaaacaaatcaatcctccttccccaggagccagagtctcaaaatgccgtggtcctcatgtggtcaggcagtgaaggttgttaattgactatgactagctgtagaaagaaatcagggtgagaagatgattagatcttgcagttcagctcagtcagtaagaatgggcagggttgttcagtggactgcctctcccaataattcacattcaacctagaatattcttggctgaacttaaatttttatacgattatgccaccctatcagcaacttgaattagacatattgacaaggactaggaccaaatctgtttccacttatttcagtcaatactagattagggctattgtcagcagaatcccatccacaggattaggtcagtctgcagtattgacctccaccatgcactccaggatccccgacccaattaaataagtcacagagaagactaataggtcaaatttcagataagcacctagcttcctttcttatggtatgcatggattgctccaccataccgtggatattaatccaaacaaaacaggaacagttggctaccatacaaattctcctccattcagccagactgtagtctaaggccaatcaatgacccatttacaatcagggagctaagactgacctgctgatcttctatggtttgttctgtctcattggctagggtagctaaacttaagaataggttcctggcctgtctctaaaatgtggactctgatgctggggaacagtactcacactgctgtatggaaatagaaaaccatgtatccctcaggcaggacagccctctttacctaggggactaacaaaggaaataaaatccaaagagtggcgccattgccaattattgcaaggactcaaagatgaaccaaatagcaacctccacatgctccagtggatggatatcctctgggccactctctcccacatatgaacatataacttgatttggatcaccatgaccttggtttggttaagctctatgggcagggtcgccaagtacttgtcacctggacagccctccatagcatgactcaagggcactcagtgtcaggagaagcacatgaatcagtatgagctgtctgagtgattgtgcaggtaaaaagggtgattaattttggggagctgactttgatacaccaggcacagtagaataattctggaccaagcaggccaacaggagattttctgatcccacagcacacggatgaggatgataaatccagctgataaatccagcagtgttacgggttggcaatcagagctgctgcttgtctctgatggaccatgtgattattttgccaagtgagaggctgggattcagagacaaaaagatcattcattattccctcctctgagcacctccagggtctaaggtgttctttccccaatgaagtggcgagtggtgccagggaagcagtgagtccaggatgccaaggggtacctccaggtggagactgtttccctttccagaagcctggagttgaaaagggccccctaggtggtctgctgcaacagcctgctacactgacccacgtgtcacctgcagcttaggtccccagtcatatatggcagactttctaatcaacttgtacataggactcaacaagaggcatgcatagataaggcacgtattgtctctaagatctaaatagtccaattaagtgccaggcttcctttctcttaggagagccatagagcaaagaatattttctttaccgtctaggatcaacttttgagtcttagtccacatcattttggagatactgacttgggtggctggtcctgtatcttatcagaattaagagcctttctgggacttcatgtgatttagcattggctaattttattaaggcctttcaatagaatatcatcaatacagtaagcccaatttctctgcagaaaaaaaaaagagagaaagagaaagagagagaggcttgtcctgtgttttgacccacctattggcgataaataacagggaaattcacgtagtactgcaacagcccagtaaacatgttttggagggtcagccagggaaggggtcttaatctttgggtgcaaaagggattgagaaaaatacatggccaaaatcaaaaatggcacaccaggtgctatcacagggaattgattcatttacagtcacaatgtctgtaacagccaggactataataccaactaaattcagttggcatgatctaacacaagcctccagattcccattagttttttttttcactgaccatacaaggctgctacattgagatattacatttttcattagtcccattgtatttaagtccttggtcaaggttgtggtttcattttctccttctggaattctaattaaaaaaaaaaaaacaaaaaacttgaagagaaccaaagccaagttgtgatcagttgtgcatgcatccttctatccctctctacaaatggctcttccaatcaaaaaaatctctcttgtacatcatgaacatttacagaacaagaatgtaaattatcaataccaattacacattcagccctgggagccgcaaaagtagtagataacagggctctaaacagctctgcctagtggatacagttacttcctttcctatttttttggtatcaaatctgggtaattaaatgtgtggtccttacaagagaaggacctcggagaacctagtgcagtccctcaggagaacctagtacttagtcatttgagcatggatatcaaaaagagacataaggcggcgcagtggctcaagcttgtaatcctagcactttgggaggctgaggtgggtagatcgcttgagctcaggagttcgagaccagcctgggcaacatcgtgaaaccccgtctctaccaaaaatacaaaaattagccaggtgtggtggtgcatgtctgtggtcccagctactcgggagactgaggtgggagaattgcttgagcctgggaggtggaggttgcagtgagcagagattataccactgcactccagcctgggtgacagagtgaggctctgcctcaaaagaaaaaaagagagagagagagaataagagttggacncttccttctctcctctacctccattgttccccccatcaggtgtaatgcctctgattcctcttgggaatgaagagagcttgtccttaaaggagtctaaatcaggatatagaagtttaaagttagacagtagaggttctgagggggtgatctgccctggggcagcaacctggcttccccctccattaaaggaggattgatctccacaaaggaatctgtttctataaaggaacatagagtttcatctgtgtaaacaactaactgcctccctagggcccaccgtcgctagatatctggactgagtttctttggcgatcatccgatcattcccttctttgggagctcctgtttagtaggcatgcccacattgccttatgatcaggtccctttggaggggcttggtttttctcatcctgggctttgttttggattgcagagaccttacctggtttagggagtggtgtctttatcctagacatctagaggccctaaatcagcacagctgccagtacaggatctcccggcaagaaaagtagtggaatcctcaaccttggagggagaaactcaatcttaaaaatgcactggtcgtgctctgggtgagggttcatcatcaaagctgtcattctgtccaggacagaacaagtctagggcagcttcagccctcaggctttaaatagcttcctccatggggtttcatgagattttattgacttaagaaaatcttcttcagttgggcgtggtgcctcatgcctgtaatcccaccattttgaaggccgaggcaagtagatcacttgaggtcaagagctccagaccagcctggccaacatgggaaaccccatctctactaaaagtacaaaaattagctgggcgtggtggcacatgcttgtaattccagctactcaggaggctgaggcataagaattgcttgaatctgggaggtggaggttgcagtcaggcaacatcatgccactgcactctagcctgggtgacagaacgagactctgcctcaaaaaaaaaaaaaaaagaaaagaaaagaaaagaaaaatcttcttggatttaccataatgtagtcactaaaacagaaatccagggtagcaaaccttattgtgggacatgattctatctcaatgacataatttgcacagtgttttaaagtataaggtcccacatgagacagccttggttctgcatgctctaaggcataacctttcttactccttcattacaccaatgcagcagccaagtgtcgaacagcccctctgtctgctgatccaagcacccctggacttctttcctttctctctccccttggatctgcatcttggtactctctgtgggaatgcattgcccttcaggtgtatacatttgtaacttacaacttgacaccgttgtgctttcctccctaatggaacccagaatgttctctccatcctccaccccacagatgagcaaacagaaaccatggcagcttcttggattttatccctcacctttcaacctccatctattgactcaactcttgttcatcaacaggtaggacagaggtggaccactcgctgcccaccttctgcaccatttgggccagaatatttgctaccagacccagggagttcacaaatgtccctgaatccagcttatgagttcttgcctttttattcttccaaaaagttgttgtctgtcttggcaccctgcactttgtgccactttgagaagaatttcaacctcttagaagatggcaagaagtaatagaattccaaaagagatgactaagcaagcaagtaggttgctttgccacaactctataggtgccaaaattagacaaaagacccaggcaattgactactcacagcacagcaaacagcagaagctttagcataatagtgccagttcccctactcccaaatcccacaaggcaatacgatgggaccagactgcagtacacacacagtgggtcgtatcacagttgaggaacccagagcttaagtctcagcacctgggggagcaataaacaaacctcccctacgatcaagcagccacatcatggtcagtgctgtgctcgcctgtgctttcttaattgcctgtgtgaccagctacagaaatgatcagagtcagaggacagttagaccttgtaatttgtcagggtcagcaagggtgtgcagggacactcctggccatgatggactgcctctccctaaagtgagaatgacctaatctgttctttattcttagaaaaaatgtactgagatatttaagggtaaagcatcaaatggcttaaaaagatggtgtgtgtgtgtgtgtgtgtgtgtgtgtgtatgagagagaaaaaaagagagaaaaagcagatggcaaagcacatggataaagcacatttactaaaataaaattttaaaaaaatgatcttttacccttttacgcttcctatacaaacatctccttttctccttagcagtattataatgaatgatagcaacaattatttgttaattacaaaacttattctgtttccacagtcctcttttcttacctgaaaatagcaggccacatttccatgtgtctgagcaaatgttattgttcaacacatatgccagctttacagtggggatcaggtagggtgtatacttcaaatcagttacaggaaaaaaatcattaattttgagaattgggtaaaaatagaaatctctttatctggaaataaataagatcagaagtactgaaaaaaacatcgtttttctttcaaaattttgatcaagtcataaatgatttgaggctaaagagggaggaagagggtaaaaaaagggggagaaanagtttcaattaaaatgtattttttcaaggaaattatcaataatctctctataatgactagtatacagttcttttcagtagcatacacaaatgaagagcatattcataatgagccagaagattattcataatgtctgaagagattgattaatgtcttgacatttaagaaaaactgaggcttgcaggtgaaagtatacatgaaggtcttcaatgcagttcttacgagcagaagatgctcaacaaatgtgtgttgcaaccgtatctgaaatgttcactgtctttgctctttctctcctttcagctagaaaatctggaagcagaaactgctccgttgccctaacagggtctcatgccattccgaccttcaccaagcttagaagccaccatgtatgtggaagcaggttgcttcaagaatgtgtaggaggctctaattctctaggaaagtgcctgcttttaggtcatccaacctctttcctctctggccactctgctctgcacattagagggacagccaaaagtaagtggagcatttggaaggaaaggaatataccacaccgaggagtccagtttgtgcaagacacccagtggaaccaaaacccatcgtggtatgtgaattgaagtcatcataaaaggtgacccttctgtctgtaagattttattttcaagcaaatatttatgacctcaacaaagaagaaccatcttttgttaagttcaccgtagtaacacataaagtaaatgctacctctgatcaaagcaccttgaatggaaggtccgagtctttttagtgttttgcaagggaatgaatccattattctattttagacttttaacttcaccttaaaattagcatctggctaaggcatcattttcacctccatttcttggttttgtattgtttaaaaaaataacatctctttcatctagctccataattgcaagggaagagattagcatgaaaggtaatctgaaacacagtcatgtgtcagctgtagaaaggttgattctcatgcactgcaaatacttccaaagagtcatcatgggggatttttcattcttaggctttcagtggtttgttcctcagttttaaatgtgcaattttcttgctcctatttaagtgttcacaaaaggtaatagtcaatgagctcatcacttcatccatgcaggaagtcaagcattaaaatgtactctttatttctcactggtttctccatactgcaggctccccacatattattttctttttttaactcagctcagaatccttatgccttttgaatcagtgtgataaaatgacagatgtttttgttgattgccagaacagtttaaactttttttaaacaataaatccaataaacataatctcaagacagactcatatgaccatacagaaaagtgtgtcatctatttttcaatcctgtgtagttacttggatgtgaaatattaacaatggcccaaaaatattttcctgaagattgtgtttatataatgtcatcaccaatattttggtctttttgatctctgctaaatgtcaagatttcctttgtaaagtgtcgatcttctaagtagtttctttaagacaattctccgctttaactgattttctttgttgtgaaacacagtagagatttggcaatcaaccattttacttgatctaggtagacagccaagtcagatggcccatgcctagaagctctccattttgaacttttgtcagcattgattaaaagaatcaaataccttgtagttatctatgatgatacaagtaaaaaactaggctgctgacttctgagtattcctgagcctacaattgtaaaattgtagactccattgtaaaatttgtattttttcatcaatctgacaaggcacaaatatgtgccagatatacaaaagcaatgtttctagaaaacagctatcatggatcagaataactgaatttactctcagatctattggctatagttatgtggactcaacccacgtatccagtagatgggaaaaaacaaaagccaaaataagttttttagtgtttccttctgatgaagtttcatgtttgcttgtaataatctccatttctcaaatattatgttccataatagacatacattatgtttaattttttatattttctgacaaaagtaactaaaactaggaccttaaaaagatttagaatgttaaataagtgtactagggtgtatatatttacatatatacactactagagcttccaaaagtaaaatggataattcaaacagaacacaatgtaatatttgtatgtaaataactgaggaggaaaatccatgcttttcatgggctaggatggtttctcccaagagatgacatagtattgcttttgctcatcaggctgtttctcagcaatcattgtttctgcttaataccagctcctagtacgaattatctggcatgttgagagcaactttgtcttcaagtnggacctgatctatctttttccacaaatgtcatgtgtgtgaacaagtttcttccatgtcatctttgagactctacacagaatacacaataaagggagttatttttaaaataagacattctaaagtaaataataaataaggtcattgtcaacgtttttcattcaaaaccattttttaacgtaaatttgctagaaccaccttccaattccaaggcaaggagagacattacaaccctgactcaactggatgggctaaggtttctgataaaatctgaagataaagaaaatggaatattctgcttttttcttccttctaatttcacccttgcctaaggatgagatttcttcccaggttggtatcccagaaatgcagactgtagctatggggcggaagctttgtttctttacctgatcacttgctgtggaaattctagcttattgtgttccaagtagttagtggtttttctccttcagtctccactgttattttgctccttcatccctctttccttgccaatcattagaaaggaaagaagaggaaagagactcgctggagcactggtgagtctctaggaccctgctatcctatcccaacagggctgtcagacggagaactcctaatgtggccatttgaaacacttctcaacattgaaatagacagttgaagttttaaaataacctcttctaagacacggctatgagtaggtaagagancattcattcccttcaataatatgactgtgttgataaaactgataaccattcacttgcaaatgttattattgaataagtctcacttagctcatttaatattacccaaaagatgctaacaaattctgtttcccacattgtcacagcatgccctttacatctcaggatccaggcaaaagttgaaattcagaaacatagatatgaaatgtaagatacaaagaaaacacctctgcaaagattccgaccacatttatcaaaaagtccccaaagcattcaaaatctttacttaagtcaagtctatttatacgtttaaaagctaaaaacaagatctttttggtaatgcttcaattaaatgttttatctaaatatgtggaaatgataagatgcgtactgcatctctcatataataaagataatcagttttatacagacatattctccatctactggcaattaccaagataagatggcactagaaatttctccagcttacgccatgaatactgcagaagctgatactatccgttgtggttttacaaattctagagggttctagccaaagcaacctaagaataggacatggtagcttaagtttttcagcttcttaactggccacacacacacaagttgtgtttgtacaattcttgaggtcaatcagaaccaaaaaatctgttgctggaagaaatattatcctcttcatagaaatatccaccagcagaaaattggtttctcaaggaatccctactgcccttgtagaaacatcaagattcttgcctggattctcaacataagtctttactcacaggcctattgcttggtttcagaagagtgagaacatgaaagttcataaatgcctgggccactgcaactctaaccactgtgtttcccccagtttgatatggttcaggatacatagtcatagaacagggcatgcagattgtatttaagaccactgcaagtaaggtctaaggcaaaagtaaattaatgagtccaactctggggcatccatttaagagccatttaatccatttaattacaaataatttcaacccatagtcagtgttcttcactgtcttcaaaaatataaaaagtacaaggaattgtgtacattacaaactgctccagaaacaaaaccaaatgtggatagctttgtgagctgcagtgtgtggcaaatgttcaaccttttgttatgcaatatcacccatatcaaataccattcttaaagcagtagacagatgagtcaagttcaatttaatgcaaacaatattactgtgttctaagcgcttctgttactcgaaaggggtctgatccagaccccaaaagagggttcttggacctcatgcaagaaagaattcaggagtaaagtgaaagtgaaatgggtcaggatcaatggtctcattgtctaaggtgttatccgagctcgttgtctcacaaccaagaaaattaaggagcatggacacaaagggtgaggttggagcaaaagtttaataagcaaaagaggaaagctctctgcagcagagacgggagcccaagtgggttgctgtttttacagctgaatccaaaagcttttataagaaactcctctcatctctgcagctatttgagtaacttctcttatctgaaaagctgtctgtacaactgcctctatctatgcagctatggggtgtctctaggcgagcacaaagcatagcttctcttgttgtataattgtgggtttgttttaagtaagccactttcctccctgcaagttcccacggagcagaaaaaaggaggaaactttttcctgggagcccactaatcacacagtgaacaaaaggcttctatgctgggccttactttctaacagtgcagcagttatagtctgagttttctccaggctgctccatttttgcctgtagctatgatttttcaggcagcctgcttctccgaggactagtcttagctgtttacctaactgattggtccttttcttctccctgaaaagcaagtttattaagaaagcaaaggaataaagaatggctactccataggcagcgtagccccaagggctgctggttggctatttttgtggttatttcttgattatatgctaaacaaggggtggattattcatgggttttctgggaaaggagtgggcaattcccagaactgagggttcttccccttttaagaccgcatagggcaacttcctgacattgccatggcatttgtaaactgtcgtggtactggtgggaatgttttttagcatgctaatgcaatataattagtgtataatgagtagtgaggacaaccagaggtaactttcattgccatcttggttttagtggggtttggccggcttctttaccacatccttttatcagtaagatcttcgtgacctgtaccttgtgccaacctcctatctcttcctgtgacttggaatgcctaacctcctgggaatgcagcccagtaggtctcagccttattttacccagcctctattcaagatggagtcgctctggttcaaacacctctgacacttgaattacaaatataaggaccattgacactgagattttaagggaggaaaaacagattgacagtggactaaaggtacttttgtagcaaggtactttccacacaatattgaataaatgcagtgtatacatttttaaaggaattttaagagctcggaaatcattaaaattaagtttatcaatttttgaaagcatcttctgactcaaatatatgaaaagattattctagaccttaggcagatattcagagaaagatcagttttctatgggttttttccatcatgcattttatacaaatttaatatactttttcaactcactttgcatttcctgttaccttgtactgagaacttcattaaaacctgcacttgaaattgcacttaaactttacaaaatcacagaagaagttgttttccataggtgtggggtgggatgttagagctctagacattaattcctaggaatcgcatacctacggaaaacagtcctctgacctcctgtgacacatggggtgagcccttcctttttgtctcaatctcaaaaaacagtaagtctttaatccatttgcatcaaaaagtacttcatatgctcgaaactaaagtaaaactttattgaaatacattaatatgctcctggaacatactactgggtctcagacagtgcagaagctttattgtttatttgggaagagcaaggtaagaatcaagtagaaatgataaagggcaaggaaaaaagatgaaagcttactcatattaaccattctaccattggaattatttgccaacacaccttgctgctacttagagaaagtagttcacctcactaccttttatccaaagaaattatctctaaaagcactcagacattttgtagagcaagtagcaatctattcaaagttgtaaaggttctgtagaatctctcagaccaggtacaggacctaccaaaggccacagccaagcacaagcagctacattagacagttttacagctctgtatttcaggaaaacttctgtcctgtgggagcaatacaaaactataccagttttttgttagtgtaaaaattgcccaatattaaccagagcagcccaaaatatttcagggtaagaatagatatatttatatttttcagatgatatatcttcattttcgattttgaaagaacagtaatactaattatatcccatgtaaggggctactgacaattttgatggtacctgaatttgcctctatcatgcatctcaatgatttgttgtcatccaaagctatttcatgaatcaaatatcgttttctacctgccccacaactgtgtacataaaacctaaacctctgaagcaataaacctcttccattacacaggtttagattcagagttttcttgcttaagttccaactaaaagtattacattcttagcataagtatactcataaagaaaaataagtatttgttttaggttttagagagagagcacagagtccctttgagacagtggggaaaattcatcttcatattgtcacatgcactgtaataggaatgtttagcaaaaaaaaccttccagagaaaggtggtttccaatattacctacaacttcctttgcaatttgatttttgaaaggacctaaaagttgaaaacaggctatcacatcccatttgctttaaagtctcttaaacttacgctctttcgcttcaaatgcataaatgttttatttaagtttgcattgcccactaaggctagacatttttttttttttttttttttttttttttttgagacagagtctcgctctgtcgcccaggctggagtacagtggcgggatctcggctcactgcaagctccgcctcccgggttcacgccattctcctgcctcagcctcccaagtagctgggactacaggcgcccgccactacgcccggctaattttttgtatttttagtagagacggggtttcaccgttttagccgggatgatctcgatctcctgacctcgtgatccgcccgcctcggcctcccaaagtgctgggattacaggcgtgagccaccgcgcccggcccggctagacattttttgataaattcacagggttacaaaataccaaacggaaatgagataagtggtataaaccacagaagatataggagaagagaaaaaaaaaagaggaaataaagaagacaactcttttcctaagagtctgggtaaaattgaacatagccatattcactgaacaacatgagtgagcttcattaatttaagcacagcaaaactgctttaattaacaagaccagagagaagggagaggagactacatttgtgtgacctaatggttgtgatttcactgtccaagaggacaaagacaaagaaattctgggaaggagaacaacaattatattcccccatttcaagaagggcagaagtgtcccaacactacccaatatttgcaaaattcaaatgtctcataggctcttcttccctggttccctcaggagctgggtttctgggttgcagaagtgcttttcatattctgtatctggttgtggtggcaatgtcaccaccctacactgctgtgacaccgaaacaaccaagcctagaatcagctggtgcctcttttcatctgcagggtagatttggcttccatggttgttcactgctctgtgttaggaaggctcagtgacaggtgtacagccttcagtaatgcctcaaaggttctccaagcagaggtaaacatgtgggtcctgctggtgacatattagacttcttactttccccaaataaaaaagtgcctgctgggcgcggtggctcacgcctgtaattccagcactttgggaggccgaggcgggcggaacacaaggtcaggagatcaagaccatcctggccaatatggtaaaaccccatctctactaaaaatacaaaattaggaaggcgtggtggtgcacgcctgtaatcccagctagtcgggaggctgaggcaggagaattgcttgaactggggaggcggaagttgcagtgagccaagatcgcagcattgcactccagcctgggcaacagaatgagattgtctcaaaaaaaaaaaaaagtgccacatgccatgctatgtgcccaaagtttccttcacacaacacagccttgagatgcagtattaaattctacacttttcctaccatagtgatacatgtggcttttctttgctgtgttctgagatgtcatgctttgaaatcagtggccattatcatctaaggattccgccagagacttccaaaagaagaggtctcatttataaagtgaatttgaataaaatgaccagttaggtgttttcagaaacacctatgccctacttgcctactcttcaagggtttaggggcttagggggaggttttgtttgggttttttgttgctgttgcttgtttatttgtttgttgtgtttaagacgttttacttgtccctgaaatgtttgtcatcacacagatacacgctcaggataagaactaccagactagattaggaggtccacaccaccaattgagatgtacctgtgctcatgacttgacattgtggtgggccggctacaaccctccccacccctcgctttcactaaataacaactctcttctctccatcattttgacttagagccagtcagaattcaatctccaatatcctgactagcacaagaaatccataggttgattcttgttctcctgcatctctgcaggtggcaaacctgattcctaatgcctgttcctgcctctgcaggggttcattcagaaaacaggaaaataacaaaggcttcctgtaattctctttggctgtaatacaatttgttcccgtctgcccccaggctcacccagtgctctgtctcagtggtaagctgtaactgatcactgctgtattaactcaaaactcatttgctttatggaaattcatggcccttatttctcaagggaccagagaaaaccaataggcctactccccagctgagtactttccatgcaagctaccgcatctgtataaattaggttcaaataacagagtatttccaggatttataaattcagtattacaaatagtaatctggcaagtgttctcaggatccccttgctacctgtaattcaatcatataacttctgaatgggctgggggaaaataacaataagaaaaactggtgtttacctgaagatctgcccagtgatttgtgtgttttcttaataaactttacccacttattaaaagaataaaatgaaggtggagttaattctgactacgggattcctttttcacttttataatgaactccttccttctaactaaatcttatcataagcaaatctatgcaccaaattatttagtacaattcctaataacagctgaaggaccatttatttgaagcaatgttcaccatagcaaaattccagtgaagtctaagaactgggacagtccgttgaggatccttgtgccaggatgtatgttgccccatgaatgtgcacatgcatattaaaatatgggcacctcttttaattcttttttttctcataataagtttgaaactcacagtaggaaattgagagatcaatttggttactgttttatcattgatcctgaagacagttgaagcaatcatactggttgttctcgaactagctggtttcccagagacagctggagactgagcanataaagacatcattgaggaaaaaggctaccttgtacctcatggagagctgaaggtctgataaatgggaactgccaggtaatagctatgctatttctgacataaatttaaaaactagtattgtttcttctagctctgtttttgcatagtgcacagagatctttgtaaaaaacaggaaattaatgttaaattggatctataaacataagtcaatttggctctattatgtcaaaagagaataggagttttaacttatatctgtgttttattaatattttgaagtataggaacctcatggtgtagcaggatgagccacagacaaaacctctcagacaccgagttgtagaaggaagggctttattcagctgggagcatcgaccagctactgtctcaaaatccaagctccctgagtacacaatttctgtcccttttaagggctcacaacactagatttcacatgaaagggtcgtgattgatttgagcaagcaaggggtatgtgacaggggctgcatgcaccggtggtctgggaggaacagaacaggacagggagttcttctatacaatagagaacagaacaatgttcttctatacaatgtaaggaatctatgaataacatcggcttctaaatcataagttgatttttaactactgggtttaggccaggcgggcccaggcctggtttcgggcctggcgctgagctgcctgtatttggttttacttccttgttgtttttactgaatatgaaacaatataaaacaatgtgagagggtctttctctcctctcaatgtcaacatcatatatgattggagacttccacataattgagttttagtgcccactgttacagaaaatcataatggaaaaactaaaatgtcaataataatttcagatgtgtattttagttctcataagaacatctacattcatttgaaaaatagttctatatctattcttgaaacatatttctttagttcaaggtctgatgagctcccagactgttggggattgctctacagctgctcaagcttttgaagactcctgtgatttttttaaatggctggtttggttgaagtttctcttatcagtcaggcactttgcattttaagcgtactttaccaccgacaccctccccccccagcacacacacacacacacacacacacacacacacaacatagtgaaatggacccgtgggaattatatgatagttgtaatcaaaataaaatgcaatcaatactaaaatacaatttaccaaaggcttacctccttatttgaaactccagcatcaataatttacttgcactcttgttatttacatttgtactctggaagtaaacttaaaatgaaaattagaatttgctttcaattatactatctctatctaaatcttaatttgaaatttaaattattttgtctctacccaaaccatcgatttcatggaaatgtttaaattttcttttttttttttttttttgatggagtctcactctgtcgcccaggctggagtgcagtggctcaatcttggctcactgcaacctctgcctcccgggttcacaccattctcctgcttcagcctcctgagtagctgggactacaggtgcccgccacaacacctggctaattttttgtatttttagtagagatggggtttcaccacgttagccaggatggtttcgatctcctgacctcgtgatctgcctgcctcggcctcccaaagtgttgggattacaggtgtgagccactgcgcctggccagaaatgtttaaaatttcataaatcttgaatccataaaattcaatgctaccatttataatttaatactcctaccataaaaatttctgtgttaggcatagctatatgaatatttgcctataaatccccatcaatttaataggaattaagttagaaatactagtatatatattccctttatatactaattgtatatccatataaaagcattagtaccattatatgaaagtatatatgccattccataaaaatatatctaccaatataaatagaatatataaagggaatatatatataccaatataaatgggaatttatattggcacatacatttccattattttaatgggaattaaagaaaaaatgcctgttttcactaagtcatccttcccctggcaatacatttcctgaacttttacatacttaaatagccagttatgaaaatgtaaaacaatgagtgatcttgttgttttcattttattatgttatatgaaaaaaagaaaccttgtaagtgcagatttattttaaaaaattgaaaaactactctgtcaaacatagcaaataggaaagttaaaaaaaagtaagtctaaagattaggtgctctgtcacttgtcattacatttttttataacattaatgacacattttttgctatccaaatataatttccactagaaaagaaaagatgtcctccatgttttaaattgcatttgaaattcaggtaactaataacccttggttttaaaagatacatataatgtttccgtaggaaaaaaatcaaaatattgtaaagaatctgagtaaatgagagcctctcatggttgattaagttcagacattttaaacagactcctgcccacaaactatttttcctctccaggaataagaatggcaactgaattgttccttctttattctatagctttaagtcaaacctaacataagcaatcaacccttccacccattgtcctctttctagctgcttatattcctgagtctgaaagaagggcagaattaattcgtttccttgacagtgttgggggtgaaataaaagatagacccctgctgctctgcacgtagattcagtttgtatgccagggtgacattttaatttacagtagtccagacacctaaacaggacatagaaatgtcaactggtcatattaaaataaaaaagtatagaatagtttctgttttacggattttgtatccaagtaaatgaaaacacaatcacctttcaaaacatggtatgaaatccacagttgtaacagtgagcacaacatgctttctgtgtgtgtttttaagctctttccccacatctgcttttcaaaaatatttgcctggaaacctgtatttcgcctatagagacaaatacatatattgtttgttgtgataatgcacaaaaaggaatgttaaaaaaaaacacacaacattgttttccttttgatggtctgggagtttttctataagtttttggtttttttttttttttctcttcattagtgtgttagttccatcatcatgtctgtttactattgaaaaataaatatcttcatttaaagtagagacaaagctactatttcacatttccaggtaggacaggatgatcagatgcagctttcaaaagaactacctgctaaatcataatggtctcatgtgcagatcaaaatgtcaactagtatatcaaacagtgagcaattcactaaattatttttacattactcctatttgactgtttcagatagttgtatataaaaaatataaatttttgcattgtattgttcttgatgtaccagcatacataaacatattaggctgtattgtaagtttcctgcatgtaatatgtaatgtgtaattatatgtgataaataaaacctaaaactgatacaaatctagattttcccttgtctttctcattctgacattactgacctgttttaaaagaatattccccaagtaaatgttgcgacgtaggtaaatagcctaagaattagagtaacagacaactttgatactaaataaatacttcaaaataaagaagtgaactttctctcttcatgaattatttctatttttagaaccaaaatgtctctaaaccttgacaaccataacttcctaagctagaattctaaccaaaccatacagagaagaaaaatatccactgtaaagtctatagttgaaaatataggcagctaaatccactgatagtctactttttttaaaaatgtgttcttgatgttttgagcaggaaaattatttgcaagaaacaaagagtttgataaggtgaaattcagagcatgctctgggttgttaggtacaattttttgaagtggaaacgtctcaacatgaaaacactttatggtaagaaaaaaacggctgggcgtggtggctcacgcctgtaatcccagcactttgggagcctgaggtgggtggatcacgaagtcaggagatcgagaccatcctggctaacacggtgaaaccccatctctactaaaaattcaaaaaattagccgggcatggtggcaggcacctgtagccccagctactcgggaggctgaggcaggagaatggtgtgaacccgggaggcggagcttgcagtgagccgaaattgtgccactgcactccagcctgggcgacagagtgagactccatctcaaaaaaaaaaaaaaagaaagaaaaaaactatctcaaaataacattgcataactttagattgcctattgaaaagagttatttacaagggccttttgaaaagaaaaagctatgtccctatatgtaaaaatttcatctctacatggtattaccagatgtaatttcctgacacacagtttttatcttgtccttcttctgctcaaaagctttgaatggtgtcttattacctaacgattaaagtccgatcccttcccatggtattcaagggccttcatattttgtgtgaacatgtcacaatttattcacccattctgctatcaattgatagacatttgggtcacctccagtcttaggtgatcataatgctagtgtgtgacatcttcaggtacacatatgcatgcatttgtctggagtatttatctagaaattgaattgtttggcaaataataccaaatggttttctgaagtgactttaccagtctaccctccttccaataatgtgtgaaaagactatttttattgaaaagactatttttctcaagttcattgtcatgtacccgtgccagaattcaggcagtccaatgtgtgttggtctgtttccaactgttgaatttttccattgatctgtccattctgttttagatactgtgcgtttgcaatgagtcttgattatctagcagcgtaagccctccaagtgcttcattctcaagactgactgctattcttgaccctttacatttctgtataaatcttagaactagcttgttcatttccacagaaaaggccaaagggattgtgataaagataaactgttgtccactggaaatggcctatggtttggttgactgggacatagggtttgaaagctgagcaatggaagaagctttaagtttggctgaagactcatttttaaaaactttggctgtcatttaaggagtatgcactttattcactgcacagtggggaaccatcagtgatctttaagaacagaagtcagatgattagatttgtctttctgaaagatcactaggaggcaacatccatgcctaatttctgtcacctaaattcccaggtatctactctaaatacagagttatattcatacccaggctttgggagatgaattattccttctggaaccccaaagcagaggagaagttgtttcatgcctggctttgcaggagagagacctcaccatgggatagagtaaacaaagccaaccagatacttctttctgatgcatcgacattcaatccaagatttagtttgagaggcaggagggtgccctctctgaaatggtttatgtctgcaaagaagacttctgatgtgcaagaagagaccagcagatacaatggccctggttctgaagctgcgcctgaatcacccaccctgcatctcacatcaccccttgccctccctctaatccccaggccgaggcagggaacccacttagcactgacagtgctagagacataatatatccagaagccacactgaggaccatcaaacacaacagaacaggaacttgttaaaagatattcaaccagggctcagactcctcaccctcaagcttctgactcagatagaaggagcgatcaggccaacctgcaaattgcagatagttctcttcgagaaactggctagctgagcagcgaatttaaaatttaacatgcattttttttttaggacaagagtcctaaaaaaccactatttgagtccaaagaaaaccactatttgagaagggaaaatgagaatagtagttaacccagttgtcaaaaatagctgacagaaactatctatttaaattaggtttcattttgggaagagaagatctcagaacccttctttcatacccacccatcatctatgggtttcccagagccagtctggtggccagccaagacgtggacaatttcactaagtcaaatctatagtncgcattctaacaacgctttttaaatttcttttttgccatgtgtactatggaattcactggaggtgtcagaatatgagaacagatatcttcccttattaagtctatgtacccatcctaaagaatattgacattcggccaagtgcagtggctcatgcctataatcccagcactttgggaggccaaggcgggtggatcacctgaggtccggagttcaagaccagcctggcccacatggcaacaccccgtctctactaaaaatacaaaaattagccaggcatggtggcaggcacctgtaatcccagctactcgggaggctgaggcagggagaatcgcttgaatctgagaggtggaggttgcagtgaaccgagatcatgccactgcactccagcctggacaacagagtaagactccatgtaaaaaaaaatatatagatagatatagatatagatatagatatagatatagatatagatatagatatagatattttgtcaagcatactacagcttaatgtttgcccagatgtgggggaaactttgttttttaactctgtcttcttcctagtggcaggctccctggccaacttgaaaaggctatataaaaggcttggtccagccatggtgtccaacttctccaaggtacctaggcctcatatccaggcatatagaacctcttggccttggccaagtctcccgaggaatgaaagcagtagctgtaggcaccactcgacattttcctagtacagcctggtactcccagcagtgccaaagctgctagtttcccattgaaactagaaatgtgttttctgaaaggaaagtatacccaaaacatcaagactgagagaaaaaaantgaaagcatttcatatttaatgtccctaaagaagcatcgtagggaatattaaactcaaaactttgctgggctttacctgtgttgagtatttttatcattttgacttacacacagaaggagaatcattctcttgagtgtttagcacctataaaggcgtgattcggctctgcctccaggaaggctgagacatcatatcccagagagtcctgggtgatcacagggaaatggctgaatatgaatttgttgggtcctggccatcataaaggcaaaagaagctatagccaagggatcccaggcaaacccctacctgtgtcatgcctgtcactagttctgttttctggggcttccacgtctctatctccccatcaccactctcctgcccctcgcctccctgactgcgccatggtttcattccaaggctaaatatttaatacgaagaacactctgcccaaggtagaaggagagaagaaataagagaaactcctatgagaatgtgtgtatgatattaggctatccctgactcttcttgtaaaataatggtgtcaatttcagctgaatcatctagaaagagatgtcagatatatctaagtgattctgtagactgaactcatctaaatctctcatacccacctgaggggccctctctagaatggccagggggatctcatgttccacctaatccctcagcccctccgcttggttcctgggccctcttcctgcactggcgcagcatccccacagacagtgcccaagacagtgtctgaaattcaggtacaacaaaaatatacatctcctttacttcaaatacatggggagagtggtgaaaactggcagctgctttccatgacctgcccatatgatgtggatggagctgggatttgaagggatgccaacatgtgacttgcaaaggatgggtgaaaagggaggcaagccgagcgataggtagctgcccacacctacttgtcaaaaaaacattcctgctgctatttggggatataaagtgtctttgaaagcagctcacattttaaaccttttaatgataacaaaaattgtaataatgatcttgtgaacatacatcaagtatggactatttatggtcattccactaagatctttatgatctcatttaatcttcacgacaaccttagacagtaatactagtatctcgtttcacagattaggaaaccaagcctgagagattacattacccacagtagcccagctaatatattatgtcaaaactatacttttaacctccacattacactacctccttcaaaaattattccccaagaatataggtgaaatgcctatgaaatacaagtccataattagaaaagtgggcttatggtaaagagaatattacatctatgtacagtgataaaaagaaaggaaaagataggagtatatttattattttaaaatgtatctgttacctctgaatatacttgctttctgtggcatgcttgtgcaagactaataaattatattaataaagaaataaacctttatgtactcagttattgatgctaataattttatttccaaagttagaaatatttttctataatttaataaatcattaaatttatttaacagaataaagttaacagataaacagaaatcaattcataagtactctataccaggggccaccttgggtattttaagagattcaaaaagagaagattctggtgatatttacagtcttattccaattatcttacaaatcaaaatgaaagtgtacagcctttacacatacaaaagaatggtacagattcagtcctaagtcaaataacacatgttttatataccatgagagttcagaaggaaacaccatttcagccacaattggcctggaaaacttcacaggtaaaatagaagtatgaaatcgaaatcaatggataggacnagagggatgttggaagaagaagaatttgcatgagccagacacagaagaataaataaccctgaagacccagaactcagggctgagacccatctttctgttaaagagccctcacgttcatgaagaatattcagaattcatttgtttccaactaacatggggcataatgctgagcattggaaatagagatataaaaagacatagtcttccccttcaaggacttctgagcccagtagaaagcaaagaaaatcaagccagcatctacaatactaattaaaattctgagctttcaagtcacactgaccaggtgtaactccttactccttcgacttactagcatattcttaaactctctgagcctgtttctgccactgcaaagtctctcataattgacgtgaggattaaattagacagtatgcaaaaagctttcaggaaaaaaaaaaaagtcacgcagttttttaacaagtaaatattttaatgctaatattttagaataccttcatacagaggttattctaggccagttattcagttgaatcgcctgattgctttaaaataaaaaataccaatgtctggaacctgctgcagatgaattatatcagcaagtatctggaggtgggacctggtcctcaggactttgctcaaagtcctcccggtaaggctcatgtgcctgctttctgggttgagcatatggaaggaataaggagctctgcccatgtgtttgccgggaaggagcgtgtcaagatgaaaccacctttgcaaaattatgacggagacagagaaagaggtccaacttaaatgaccccatcttgcctctaacctccaaggggtcctgttaattcctgggcataggctgaaccaactttgggaggaacttagtttagagtttatagtttaaaacaaagatgataacagacctttcccaaaacaaacctccttcttgcctgggtactagacgactaacattagccacaagattagaaattatagtttaggagtcacgtagccggaggctacaagattctgaccctccctaaactgctcctaagatcaatgcttgagatgttttgcagactctacacttgatggatcaaccggcactacccagattgagaaaccagcccatctgatcttgtgaccccacccaggaactgactcagcgcaagaagactgggacaccccaggatttcacctccaagccaaccaatcagcactccctgactcactgcccctccactcccaccaaactgtctttaaaaactttgatccctaaatgttccaggagactgatttgagtaataataaaactctgacctctggcttggccagctttgcgtgaattactctttccctattgcgattccccagtcttgagaaatcagctctgtctgggcagcaggtaaggtgacccattgataggttacaaaggcaggcctcctggaatggatgattcctgacttgtgtcgctggtatcagagtctgacagacaagaagggaagaggataagatgtgtaccaaacattggagaggtcaagaggggggttatagtcctcttttgggggtcttaaaaatggtttcccttttgaaaactcttggagttctcaccttaaaatctcttgactttaaaatttctttcaacctggagcacattataaaccagaaaataagaaaaccagaataagctgaagagaaacagctaccatgccccaaggatggagcaatcaacaaaaacagtgctttgaggatctcatgtctctagcatctcagaaaaagccccctgacctgtgcagcccagggacaccttcttagtttatagctatccttaaaatgagaaagggcatcactatggctgcagctgggcctaacacacagccatcagtcagtggtcggttaatatattttcagaggagcaatcagagtgaaagacacttaaggcccctggtaagtgtaggcagccacttaaatcagcccctaacatctagcttgctagaaatttgatcaaatgcttatcttctccacggtatatgaaatggaagacatgatctgcagaccaagatgaccagaaaaaagaagcgttcattcccctggcccgcagtttaaattccccggtgacgttatctcttggggggaacaaaaaagaaaaatcacacttgaatcagtctaggccaaaagcaattgaggaagcaaccatcccatctccagttccccgccctcttgagaaaaccagaacggagggcctgaaacattgatatgcaagtcactctcaagctatgactcagttttcttctcaaagcaattaacaattaccagcatttattcagtgaatgggagtcaggcaaacagacagacactgacagtctgtcattatcgcaacaaaagaaccacagcttttatcctccccagaggaagtaagactttagaactcttcaactttcaagcttacatacttccctgacctatggtttatttcatcatcagccttaaaaataatagaaagtttagccgtttatgttattttattttttttttttttttgagaaagagtctcgctctgtcacccaggctggagtgcagtggcacgatctcagatcactgcaacctccatctcccaggttcaagcgattctcctgcctcagcctcctgagtaggtggcattacaggcgtgtgccaccacaccagctaatttttgtatttttagttgagacagggtttcgccatgttggccaggctggtctcaaattcctgacttcaggtgatccgcccgcctcaacctcccaaagtgctgggattacaggtgtgagcagccccgcctggccttatttttgaggcactacttggagatggacctcccaagaatcatatgcagctccagatagggcaaaaggaggccattatgaatcatagatatacaggtcaacccacagagggcaccctgcctacactccctaccctattgacggcctggcaggagaaggcaccctttctgcaaacttcctgcagactgcatcctattggccacttcctaactactcagatgctgtttttaatgtgatcaagtccattcaagagttggttgtcacatgtccatttgaggccagcactagatgctgtagaagccagactgaatgaatgactcacgtatggccccagctcttcagtactagacttacagtttgatcagagcctcagtcatggagccaaggcaaaaccagaatgttcactccttggtggtctcatggttaagatttgtcactctcaaactagaatcagatccacccctgactgttattggatgcaatacatttagctattctgagcctaggtttagttttctcattcatcagaaagataaaacctacctcacataaaagagataatggacacaaagcaccttccctgatgctcagtacatgggcagcgcgtgttaatgttataaatcacccgcttatcccagtctttaccagctggtgagtataaatattctaacggttagcttacccctaagtctcagtgctctatcccctaggtctgtcatgccaaaactccagtcttttccattaattttctcccaaattatttcctcttggaggccttgatgggggtggggctggtggtattcgcagcagccctgtggtctgaagtcggcagagctctgtgtgaagcccgaaaatttgagacaggtctcagttaatgtatcaagtttatcttgcagaggttgaggatgtgcagctgtgacacagcctcaggaggtcctgacgacatgtgcccaaggtggtcagagcacagtttggttttatacatttttgggagacgtgagacatcaatcaacatatgtaagatgaacattggttcagtccagaagggcaggacaacgcgaagcgggcaaagggcttccaggccacagctaggtgaaagacaagctgttgcattcttttgagtttccgattggtctttccaaaggaggccatcagatatgcatttatctcagtgagtaaaaggatgactgaatacactgggaggcaggtttgccctaagcagttcccggcttgaattttccttttaccttagtgatttcaaggcccaagatattttcctttcacatctcccaatccacaagcctcagttcctgccttacattctgcctctcatgaccaagttttacacaagtggttgctagtagatctgtggtactggtatcatctttgatttctcctctccagagtgctcaagcatttgaaagttggaaaagatgcaaatagcccaactctcacgctctggacctgtaatctgtcccctccaacctctggccgtctctgctgggcttgtgttacagtgggtagctcatcaggcatgagcagggcaggacaggactccccaccccacccctccaggaaagtcaggtgatggtcaagcagttgtcacactgcccctctaaaataacaataggtcgcagccagcgccagggagaggcagtctctccatagataataacacctgaaattggtcatcagcagcttccaataagatctcaggaactgggtgactgggctcgaccatgcacattaagaggcaaaatgggtagtatgaccttctggggacattccaccagaaaaggcgagaacacctcaggcgagcatgtgtacaactccagtaaacacactgtgtactcttgtcgccctgggattataggccactgagcatgcaggcggctctccctgaaggaagaatccaaggaaaggggcactagactccagtagtcgaccagaatataaaatcctagatccaaggtcaaacggggcacttgtccttcaagtcacccacctgggcctcttccaagtgtactttcctttctttcattcctgctctaaagctttttaagaaacccttactcctgctctgaaacttgcctcagtctctttttctgacttatgcccctcagtcgaattctttctactgagaaggcaagaattgaggtagacttgcacggattcccctccactagctcggataccttccactgctcacacttggccttttagccttgcagtccatggtttctgccactcttctcattctctaatgcagcctcatctgaggttcccccaattccatcaaataactgagacctatctgaaccccaagggaggaccagttcttccttacaattcttccaggttccataccaatcagagagtattttgaactccctgaacattctctgcctggagtagaggaattccagccagactaatagagtctcatttctaatatatatataaaaaaaggtcactaacatagacatacatatatgcacataaatgcacagatataatatgtgtttaatataaggtaatttaatatttttttgattgcctttctacagtaagccaaactgcttatgtgtctattaatacacctggtatttttctgagttcactcctctgtcccattgtatctaagactggcatacctagtccttctctcatcactcttgctccatctataccgatacctcaaaatgcagctcaaacttcaccacctccatgaagccctccttgaccactacagcacacagtcctctcttcttcatctacatttattaaaattattggtcatgatgtaatttgacaatgaatttattcttcatcaggacaagaaagatagacaggaagcaaagagtaacaagaccacagagtgaagtgtaagaatataaattgccttctcttgcataaactactgggaaaggagtttggagacagatagatgctatggtttgaatgtttgtcccctccaaaagtccccatgttaaaaatttagttgcctttgtttcagtgttgagaggtaggacgtttaagaggtgattgggctatgagggtttcaccctaatgaatgggattaatctcactttaaaagggcaagtttggtcctaaaacaagactcaggaatttccacttctggaaaaatggagtagatatatttttccttacttctactacaaaataccacacacacacacacacaaattgaaaacagaaaaacaatagagaaaatcactaaaataaaaaggcagttatctgacaaaagcaataaaattgacaaccctctagcaagactgaccgaaagagaaagagagagagaaaggacacaaattaccaatatcagaaatgaaacagggttttcagtacagacctgcagatatcaaaaggataataaagaaatactatagataattcaacaaaaataaatttggcagcttacatgaaatgagccaattccccaaaaatcacaaactaccacaagtcacccaatatgaaacagataatttcaataccctgtaagtattaaggaaatagaatttgttattttaaaattctcaaaaaaatgtctccaagcccagataatttcactgaagacttctactaaacgtttaaagaagaatttacatcaattctacacaatctctttgagaaaattgaagagaacacttcccaatttactttcaaagctactgttatattgataccaaaccagataaagatagcaccaaaaaaatttacagaccaatattcatcctgaataaagaagttaaactttttaacaaaatattagcaaataaggttcagcaacatttaataagaattatacaacacgggccgggcatggtggctcaagcctgtaatcccagcactttgggagtctcaggcaggtggatcacccgaggtcaggagttcgagaccagcctggccaacattgtgaaaccccgtctctactaaaagtacaaaaaattagctgggtgtggtggtgggtgcctgtaatcccagctactggggaggctgtagcaggagaatcacttgaactcaggaggtgtaggttgctgtgagccgagatcgcgccattgcactccagcctgagcaacaagagcgagactctgtctcaaaaaaaaaaaaaaaaaaaaaaaagaattatacaccatgaccaagtggaatttattccaaggaagcaaggctggtttgatactcaaaataaatcaagaaactcaccatatcaatagtaaaagaagaaaaatcatcattatatcaattgatacataaaattaatttgacaaactttaacatccattcatgatgaaaactctcagaaaaataagaatagatggcaataggaactccatcaactagatttaaaaaatatatataccaaaaaactacagctacaattatatttaatggtgaaagactggatgttttctccctaaacactggaaacaaagcaaggatgtccaccctcactactcttattcaagaaaatgccagaagttctagttagtgcaataagacaagagaaggaaataaaagtcatacagttaagaaggaaacaaaccaacaaacttctgttggcagatgacatgactgtgattatctttgtagaaaatcctcagaaatcttaaaagaaaaaaacaaaaaaccctcccagaactaataagggagttcagcaaaatcacagaattgaagatgaacagacacaaaaatcaactgtatttctatatgtttgcaacggacacatggacagccaaattaaatatacaatgccatttacaatcactcaaaaaatgaaataggtgttaatctaatacaaacatacaggactcatgctaaaaactataaaacactgatgacagaaatcaaagacatttaaataaatggagagacatacattgttcataggttggaagactcaatgaaataaagatgtcaattcttcccaaattgatatacaggtttttcccagcaatgggttttgtagatgtagacaagattattctaaaatttacatgaaagggcaaggaactaaaatagctaaaacattttgaaaaagaagaataaattgggaggaagcagcagtctgccctatttcgatacttatgtagctacaggaatcaaagatgtgcggtattgacagagggatagagacatggatcaaatgaacagagatagaaaacccagaaataggcccacataaatacaccaaacttatttttgacaaaggtgtgaaagcaattcaatgaagataaaagtgttttcaacaaatggtgctggagcaattggacatccataggcaaagaaagaaaaataaaccttgattcataaggtttataaccctcacactgtattcaaaaagtatcatactgtccttgatgaaatagcccaacaagaaggcaatatttgcatggggcatctcagcaagtcagtggttttacaaagagacatttggttaacttagatatttaagtaaagaaagaaagtgggccagacgcagtggctcacgcctgtaatcccaacacttcgggaggccaaggcaggcagatctcttgaggtcaggagttcaagaccagcctggctaacatggtgaaaccccatctctattaaatatacaaaaatcagctgagcgcggtggcgggcgcctgtgatctcagctactcaggacgctgaggcacaagaatcacttgaacctgggagtcggaggttgcagtgagctgagatcgtgccactgcactctagtctgggcaacagaacaagactccctctcaaaaaaagaaaagaaagaaagtggaagaggaaatctacaacctactttgatcaataatttctattggtggataagggtaacacttaaactccagccaaaatttataaggtatataatggagtactttgtgcataacatataaaatcagtattgaaaatatgttgtgtgattgctggtgaatgattctgatattcactcatattggatgatacattaaggtgacaagttagggaaaagagcatttgcattctagcttcattcttgggactgacaaactatggtgcaaggagaaacacaatatcatccttaatatgctgtgcttcccctgggtacctttatgagcatggaactgaaagggcaccccacatggaagagccatgccgaggggtgggtaactgtcctaggtcaggttccagagaagagttggggccagagatggggatttttgttaaagtgatgcattgaggagggaatctcagaaggggcattgggaaaggagggtggggcgtgggaagtaagctaattaacaaaacagtctggatagaaactagcttccatctagtcttgagggcagctctgaagtccacattgcaccacagagctggttctaccttaagggaaatggacttttgtactcttcataaatcagttattggtcactggctgctgagggagaggtggggaaggggagcagaaggacaactgctccagggaagcagctgctattcaaccagaggtgaagttctggaggacaaggcaatggggagtggttagcagccaccattcactgtaatttgggtccatctgcctggataagaggatctaaacagatcgctatcaacacccagtggagtccatctcttctctcgctcatgttctcttgtttttcatattgttcactacataggaactgtcatgatttctggagaaacttccaaaaggcaagttagggtgatgaactacagctgtgtggtacaattggtcctaaagccttcggtgatacattatctccctcctacacaacacattctagattttccttcacttgcgtttctgctgtttggtgtcccaggccttcatccctgagctgtttgagcccctgttcaccatatacttatcaggccagttgcttcactgagcgagttataactgagtgtgagcataggcataccaagagacaccctaatagatcatgtgaatgccaaccatactcttccttcttctattaagaaacagcaaatcctacctcctcatgattatcaatcatccctgccagctggtaaatcctttcagtgccactgatctcctaccatgaggaacccaaaggaactaagtgtcaggcataggtttactggaattcttacagcatcctctggcaggagcaggacctctagatccagagagcctaaagttgtagggatgggaaacacaaatcccaagttgatcacttggagcagtgaagagctggaccagtcctattttcaccccttggttccttgacctatataattcagcctattggggtcagagtaccccagttttttataaagtatggccagttttttgtaaagtatactatattctgaaggctgattctccattctcataagatgtcttccactggcaggtgcctcacctgcaccttcaagagactttttcaaggctctttcaggccaacagcttctgaatggaaaagcatgtgaaagaaccacatgatcccatgattatgtgcccactgcctcacttccttggccatacagtgggatcccatgcatagatcaaacattctgtgaaccctggaatattagtgttgactgaggcactgtatcaaggaaaggccaatccatgggtgaaatccttgtctttcatagccaggatgaaacattgctttttcccagatggaaggggtccaagctaatcaagttgccaacaagtatctggttgatgtccaaaacatgataccttattgggactctgcattgacttttgttattagcaggcaagccatccagcagcagcagtagcttgcagccttggtgaatgtgtgcatgtctgggggccatggtgcccctccatctctgccaccatgtcttctctgttcatgagcccatgcacatgtcaacagagaaactagcagacattgctggctgagtcatcctgcctgtgtgcttcttctgaaagggacgctctctggtaggtattttcattcaatataaagatcagatcatcaacattgtgcccactcccacaggtacctccacaaggctctcccccagacctccttgtccactatgttccttgggtcacttctatctccacacaacatggatggcaagatatgttacatgaagctctgccccgtggaaggctttccattcatcaccagctttcagagtcacccataagtgaggctgtagggcagtcatagcccatttttggcttgaacatttagaaaccagtgagaacatgggtcatctattacttgacctctgtatacccctaccttaacacagaggccatgatattttttgagtagttcctggaaatcagaaacaatgtggcccctgtatacaatttttcttaaaagatttatgtattccccttccccattgtacacttgcccaagtaaatggttataggttcctttgggaaggactaggggaattgcctgtatcttatctcagggtgtattagttcattttcacactgctgtgaagacatacctgagactgggtaatttataaagaaaagaggattgattgactcacagttccacgtggctggggaggcctcaggaaacttaacaatcgtggtagaaggggaagaaaacacatccttctttacatggcagcaggagagagaagtgcagagcaaaggagagtgggaaagtctcttacaaaaccatcagatcttgtgagaactcactcactatcacaagaacagcatgggggtaactgtccccatgattcaattacctcccctccatccctcccatgacacgtgggattatgggaactacaattcaagatgagatctgggtagggactcaaagcctacccatatcacatggtgttgttaaaatcgtcttcctcatgagaaacagcctcctcttgagggttaggtctcaaaactgaacaagggattgtgactttcttttgaagcagctgacctcagccttctgcatatccattctggatcgtgtgtgtgtgtgtgtgtgtgtgcgcgcgtgtgtgtgtagagagagagagagagagagagaaacttcccatatatcttgtctttagaaatgccacattctattattctattagcaatctcccaagatcttccaagatccatatggttggtcccatatggtcaaggccccaggtagccattccagccttgtgcctactacagtagttctgaataccttgcttatgactatacagtgctgccatctggcctctactattccagaattctgttatccccgttgcttctagatagttattttccctcacagcgtctcctactgacagctcccacctccacaggacagccaccatagctttttaatgatgctaatagccccctcaccagcacgtcccaattgctttggcaaataatgtcccaccaaggcagattatctgctagtgggtttcctggtttaataattcaattgtttgagtttttcccctacttctctgggcacttgcgtcccttcctccacaatctgcctggcagttctgacaactcatcttcattaaatttgggacaccattttccaggctttcaaggagagccatttcagcagcatattagtctccctgggctcttgcccagcatgaattcctgtggcagacaacagggatggtatattaagcctatattaataacctctcccttgtcttgcttgatgctttgttcttgcttcccttgatccaaccttcaggatctactcccaggtgttgtgtcctggttcctgccagtgagtcagaaggttctgcagttatttgatgtataagtgccttcgtcctttagtcagactagcccttcccccattggctaatgctgattggtcctattgacaaatcaggcacccaagatagggaaattgggagtgagcctagcaaggccaggcattgtcttataaggtccctgcctcatgggaaccctctgggtagttttgaagactgggggcttggagccctatatcccaataaggaggagtccacctctgttgcaggctcagacgtttcaagtgaacctggggattcacatttctcaagcttctttacccgcacatccccattccaagtctcaaagccttgttccttctctgtcaagatcctgactttgacattgaagactggccaaggccaagtgtttaatcttctttgaaattctgtcactcttgtacctgattttgaactctttctgccttcggaccacagaagattagtattaatcagtatctctctaaatgttgcccaaaaagccattctccaacattttgctttaaattgttaatagacctgagcctgttatctaagcctgttcctctcttcgatgcgtcaatggcactcagcgactactttcccccacgcctgtcaaataccagagacactgccccagctggtccaccctcttcctcctgtgtcttgtctcagtccaccacaggtaaaagtctcagcaaccacagaccacaggaggtgttgtcccaattggcatgcagctggctctgcaaccaaggagcgcccatctctctaattccatccttacgatcggtatcctgggtcctttccagtactaaccgccttaggctggaagcaaagcctgagaaatggagtcttgggaccgtgatttattgaaggaatgctttcagaagggagtgagggaagcaagataggacaagggggtgggagaacctaagcaaggctgtgaccttagttgtggaccagattcagcctggtccctgggggaagccctggagcacacatcctaccacagaattgcttccattttgagacaagggcaaaagaggggcagggccctttgcaccacagctgtcagtcattgttgtggccgccatggttggggatggggagcataacctcctgacctgagtggctttcatgtagctgagggaaattttctggaaaaggagcacggtatttgctgcaaaaactcatagccactggggaatgaaagctctggccaggtaaagggatctgggcagggcatcaacagcatccacagcaagagcctctggcatgaggacaataatgtgctaaatctccaggcaccctgtttgcctgggaattttgctccttccctacacctcctactctggctagaactgccgaggtatgctcagaagagacttctgggttgatgttgtgtttatgccttcctagaatacgtgactggaaaaacaagcagactggcatcaaggaattagctataaatccaggttcgttcgtttgtttgaagagaaacaacaaatagagggccgggcgcggtggctcaagcctgtaagtcccagcactttgggaggctgaggtgggtggatcgcttgaggccagaagtttaagaccagcctgggcaacatggtgaaaccctgtctctactaaaaatacagaaaagttagccgggtatggtggcgcaggcctgtaatcccagctattcacgaagctgaagaacaagaattgcttgaccctgggaggcagaggttgcagtgagccaagatcgcgccactgcactccagccaacagtgagactttgaaaacaaaaaaaaaaaagaaagagagagagagagagaaagaaagaaggaagaaagaacgaaaaagaaagagaaaagaaaaagaagaaagaaaagaaagaaagaaaaagaaaaggaaagaaaaggaagagagaagaaagaaagaaagaaagaaagaaagaaagaaagaaagaaagaaagaaaggaaagaaagaaagaaagaaagaaagaaagaaagaaagaaagaaagagaaatagtgttcaggttgtggttacacaggtcaggaccaatgaaattctgtatttatccatgcatttcaacagcaacatccactcagaaaagccccctcacactgtcatgggggaagaggctgcagactaggtcaaatccatcagtctgacatggcaccaagcagatcataaacctaagatgttaaggcctaaattatcctttgcttgatgatacttgattctcaaaagtgattttttaatgctttgtctttaaatgcaggtattgtgaatacctgatctgataattaaaatattgtccccattgcacctgtgcacacataatttttatttttgtttctatttattttatttttgagaccaggtcttgttctgtcacccagactgcaatgcagtaacctgattatagctcactgtagccccgaactcctgggctcaaaggatactcctgcctcagcctctcacgtagctgggacctgggactacaggcatgttccaccacacctagctatttttttttttttttttaaagagacagggtctcattatgttgaccagtctggtctcaaactcttggcttcaagcaatcctcccgcctcagcctcccaaagtgctagaattgcaaacatgagccacagctcccagcacttgatttcttaaaagccagaaatttcttgcttttcccctcataaagatgaattatctttcctatggtgaacataccttgaagtcaaattcaagttacggggtgtgaaaaaggactttcatgcttctagctaaaacgtggaattcctgggatttctgggaggtgttgctggtccacggggactcagcaggatatttgaaagggagatttgcagtaagcaggatagtgttcagtcctaatcactggaacctgtgtagacgtaacaaaggggaatttaggctgcaaatcaactgaccttcaaatagattcacctggattatccaggtgagcctgttgtaatcacaaggttgcttaaaagagccccggccaggaccggtggcttacgcctgtaatcccggcactttgggaggccgaggcgggcagatctcctgaggtcaggagttcaagaccagcctgcccaacacggcgaagtcccgtctctactgaaaatacgaaaaattagccaggagtgatgacgggtgcctgtaatcccagctactcaggaggctgaggcaggacaatcacttgaacccgggaggcggaggttgcagtgagccaagatcacgccactgcactccagcctgcgcgacagagtgaaactctatctcaaaaaaaaaaaaaaaaagccccaggaggaggcgaggagagaaggaaggcaccaggtgcaagttgctgacaccgaagctggaggaagaagctcagagacaagcgaagtggggcacctgtagcccagggagtgggcaaagaaatggattctcccccagagcctccacaaggagtgcaaccttcctcgaactgtgagttcacaaatttgttgaagctgctctatttgtggtaatttgttatatcaggaataggaaataatatgagattgttcccgaaatcaggaaacgcatggtgcctataccttttactaatacctttggtctaaaataatttttcctgcttccatgtaggagcctagaaatatttggtggtggcaggacaaagaagacagaaggtggagcttggcttgtgaggtgagacttgggagagagtcaggaacaaaatgaaaactgtgtgtgtagacagcagtcaaggagcatgaatcagttcaaatgcaggctgattccctctgatcagtggatccaaagaaaggcaatttattaggctatttcattattttctttgttcattttcaaataaatatctcatatgttttaagcagcttgtgtaccacattttgtaacttttataatatgcaaattttaaaaattctttaaacaaaatgtgggtgcctagaaataataagtaatacaatgtgcaagtcaaatttagtggtccaatggcaatttttgaaaaatctaaatattattgtattaataaacctgtaacttgagaaccactggaaaagaccacatcgattattgttgaaacagatttccaatataattagatcttttatttaaaaataaaaacaagtctagaagcgattttgatgactgccaccagagggcactgtaaccttgttgtagacgatcaaaacgcagccattaaacacttccagccacatgtttatttctttgagaaagcaacactgcaggacaaaaatgaacaccagtagtatatttcaacttttttttcatgtcatttgcctagatatatttttttcttatttttatttttatcttacaagtcaacctcaaaaacataaagcaggagagaaatgagccatgcctctttttcagtttagaggggtagctgacacaggatgagagcacagtaaaacttaagctaagatttccacattaatatcttgcccccaaacaccatgcagtgctaaaagtcacattcccatcatgcaagcacattaaaatatatggcgattaaaactcctggtttctattttacggcatttgctctttccacgaggcacacttcccttttgggctaaaggttaaaaaaaaaaaattcaaatacaatgaagaatccattattttcaatgttttctatgtggttctggggtcatgtgggaaagaactgagatgtgctgaagaggcaagggaattgcttcctgccccacgacacagagaaacgtgtgtctgctcaatgcctcattcaaggagacgagtggctttctgtgaggagagaaattatcccccttccacagtccatttcatacaggctgcaaacatttagtttcagggacttttattttcaattatgtattacaaaaccctgggcagggcagtcatctcccagttctaggattcaatttctcctgtgaggtatacaaaagaaattggaagagaaataaattggaaaaccacaattggatatcatattcttgttagactgaagaagaaatgccccctaaaactatgtggatatggcagcttttctgtacttaacattactcattaaatcatgtatgtggctatatcaaaatactgtctttcggccaggtgtggtggctcacacctgtaatcccagcactctgggaggcagaggcaggcagatcacctgaggtcaggagtttgaaaccagcctgggcaacatggtaaaccccggtctctactaaaaatataaaaattagccgggcgtagtcccagctactcgggaggctgaggcaggagaatcacttcaaccagggaggcagaggttgcagtgagctaaaatcgtgccactgcactccagcctgggcaacagagcaagactctgtctaaaaaaagaaaaaaaaaagtatttcttactaagagataatgtacctatgaatttaaacatgtcttaaatttgaatagcacttcttttcaaaagacttaaaaatattttttctttgaatctgtttcatctctgtgacattgtttgtgactggagtgctacctgagtaaattatcatgattacatgaaaagcaattaagagaagaaggtcaaaggaccaacctctaatcactaagtttggtctctaacatttgacagcacatgcctcaaaaagcaaacaaaataaacactctccatttctttaaatatatgtttttcatccaaggatcacacagcacctcccaagtagtctaatgtacagaaagaaaagaaaggaaacacagcatgattaggtgaaaccccaatccatagacagcccgccagcaggttgaggcaggaccactaggaggagactgtgctcaagcacagagagggccctttaggtttcaaatggagaatttagccaaacagccaccagggccagccgtatgctaagcccagtgcaatgaaacacacgctcccagtcaaacttcttggtttcctagtgggctatgtgccaacagcaacttcacaaggtaacaggtgaagcgaggtggggggcggagaggaggaaatgggcagagagccgctgggagtcctgagactcaagttcctgcttcatcactgggggctccgggccaggcacttcactgtaataatccacaatcatctcagagcatggggcagcgggagggggctgaaaacacaccaatttgcaaactacaaagtgctgtgtaaatgtaaggcatgggtttcacattgaaatctgactccaaacacaatctctttcttacgcttcctggagtctttgtaatcctatactttaggagtctttctaggcctttgatcctattctgagatttgagctgttgtggcaaaactaagaattctttaaagcaaaagacgcccttgcaatgcagggctcagagtgtctatttgcaatatatcaaccagtgaaggcatcacatcaggctccgttctggatctacaggctaacaacagagggaaaaggtcctcttcacaaccccaaagaggagtcctctccaaatcctaatctttagcaggtgccacagatttggatctacgtgtgctgagagattctccacttccttcctgagcagccatggttttctctctcattccacagctcacagacactgcaggactgggtataggaattggcccttggaccccaggaaactaccccaaatgcatttcagagatgacccggtctcaagaaatatactgaaagtaatccagttttcccaatattctttggaccagaaaagtggcttgaggccaagagagagaagcccatgtcttcctacattaagtgtcacggaaagtgtcacccactctccctctcactcctgtctatccccccacccacgtcttagtggccacagcctaggctgagaactcacagaagcagccctactttctagcacaacctggtcaaaagcaaaataatttacagggggaaaaacacgaatgagcaggcaatggggctccagaaagccaggtgcaaaattgtgaagttcagtttccctttcactttgggaagctctgcaaagtaagctttaactagcaaagcaaaaacttctaggctaatgttcttgactttgaaaaataaatttaagccttggctaagtaatcccagggatcttttttgccttaagtttcaatggtactaaaggagtttacagttgaaaggctggggaaatatgtcttcacgaaaagccaaaggaaagcattcaaagctattcacaaaccctgctcaaaagtgtctggagctcttcaatttaagaaaaactggaagtctacaggctggtgttgcaaaccaaagaaaaataggtggaagggcactttatgtcacactgttatttctgctattgttatttgttgttccttcaatactctttacattgccaatcctaaataatttcccttctggtatctgctaatcacagaaagaatcagtaatttccaggggcaaaaggttaaagcactgctttcctaaaccagggcatcagggtgcaatctgaggatctgaatgttctctctgtcaggtcaccacaggtcaaactcatcttcagtggcttccctaggtggagaagtacccacatgtttgctgggccaaactgactggcctggcctcttatcttagagaagtttctagcagtacaacttgcttcttgttttttgtttttatttcttaatgctaaggttgttttttgtttgtttgtttgtttacagagtattaaggcttcttagtaaagcttggggaactattcaacaactatttccattttgtttgcagatataattcaggtggttccttccatttgaatgtcaagccacactttgaagctataaaacaaaataggttgtgtgaacaatttgttacgggtaggcagggccaacatgggtacttggtgggttgtggttattcctatggtgagaaatattcatggtgattagtaagggaagactttcatattgtttctctatagctctctttaacacaatgatttctaaatttctattagtctttaatgaaaagatgacattagttgtgttgcctttggtctaaggtttgcaggcataaatggcacaaagcttaaagtttatttaatagaaaggataatctaagatgaaagtcctttgctggttaaaagagtgacttacaagagatagaaatctaaatttaagagctcatgggggttggggtggggaagaaaatgaaaaattatgaatgcatgccccatttttttcccacaagatttcctgagcattcctcagacacagtgcaacatcataacaccagtgaatcaatagtatttctatttttctcaagcaaaaagtatagactcatcaaatatatactaagcacaatatataatagtatatcatcttttaaacactagtaatttgaacttctataaatatatttaaataacaaacatagctattcacatagcacacaagtgacatataaacatacaaaaataaatccctcatgtttaactcttttgttgcttccatgggtttttgtttttttgtttttttgagtaaagatattaaaacaattcagatgccaaagtcgtcttgtcaatattgatcctgggaaacctggatataaattcacactatgtatagggatcacagccaaggacaagagcagtagacattctttgcggaacatattcctatctcctaccattgagtaggaaagctcaaaggaagtagaggtctccaattgtgatgagatgttttctctagctgttgtaaggaaaggaaacattaatcagatcccctaacctgcataaagtgtgaaaacaccaagctgtcctttgaatgagtggaatatggaacacgcctcctccttcagctctcccacatgccactgtctatgaagcatttctcatcacatggaaaaggcaccaccattccataccaaaggcaaggaatttttgttctgcaacaccacgtttgtccttccagtcactgctctagaaaacattcctccactcaaacagtgatttgggccacacagcttcccagtcaagtggaatatgtacattcttcttttgaaaaacagaatgtttccatgggcaattactcctggtaaaatttgattcttgtccatagcattctctggagagcaatgaacagaagagacatttctcacatcccccctagagccccacatcaccgtgagctcccagtaggaacacaaaaaacgcctttcaactgaactcaatcattccaatctcaatggatgcgttacgactgaaatgaggagccctggtgtattcggtgattatcttcatctaacgtgcatctttagatgggaagctgatgcttgaaggactgggtttcagttttccttttaaggaaaaatgtaagcttttgcaacatcttgaagagttgcttgtgataaaatataagaggagaaaaccctgactttgtctcaaatggaattttcaacagagggagaagaaggtgatttcttgagttcctggggggtgtcatcagtgtcatcaggggcaggcgaagcccgctgctgctgatagatgtcctggatcagcagggtgttcatgactttccactctctgtatttcctggctgtcagcttcgggtcatccagcaactggttaatcatggccagatcatgttctttacactgtgtgagtagaaaaaaaggggaagggggtatgttgagagtgtcttaatttacataaaccatctttaccaactcttttacaagtacacatatacataaaattaccaaagcatttttgcacgttaatgttctaattccagcattaagcttaagaaatacgacatttgtttgcatacgctagccgcaaagaagtgaagtatcctacccaagagttagtggaagagctagacatatagcaaagatcttctatgttgcctttccctgatcaatccattattccacaccacagtaacaattctaccttggtgtgggaatcatgcctcctaaaacttaccattgtaggtattagcattttattgacaatccaaacttcactaagtaaaattggaacgtaacactttacctaggacatatggcaacataaaatatgtcttttaagattttattaaattatctttatttttaataaatcacatttatttaatacagaataaatacacagattatcttttcagtcaaagaagaggctactaaccttccatcaaaacagtatgtattccaataatgctaataaacaacctattggtgctattccattctgcctcctctgtaaccaatggcacacatttctgaaatgtctagctcaggttagagttttctatagacaaggaatggagtataaataagatgttcatcctccatattaaaaacaaatattcagccctgacaattgtatctcaaatctatgcctgttttctccatcccatgaccataatcctaaggttggatatccagttcaatatatcacgtttgatctgctgccacagcctcctgagcgagaccactgcctccaatgcccacttcaactccacctccacttagcagagcagggatgcatgtaaatgccgagtccccctcatggatccccttacacccaaggctcctcacctgcactggcaccatttgttgatactctgcttccttttgacttcccagtctaatgtactggcatgcattttctcacccacacaacactagctcacacctccgtgttgttgtgccacatgaagaatcttccttgcctttcttcacctcataaactctaatttctagagtttcttttacacagaacactttccagtctttctttacccaatttttttcttttcttttcatttttttttttttttgagacagagtcactctgttgcccaggctggagtgcagtggcccaatctcagctcactgcaagctctgcctcccaggttcaagcgattctcctgcatcaacctcccaagtagctgggattacaggcatgcaccaccatgcctggctaatttttctatttttagtagagatggggtttcgccatgttgaccaagctggtctcaaactccttaaacctcaagtgatacacccacctcagcctcccaaagtgctgggattacaggcgtgagccactgcacctggcctacccaatttttcaaaacccgtaaatctatacttgaggcatcacattgtccaggaaaccttccctgcactcccaaaattggactgataagcttttaagtttttatgttctcatgccttccaatgatgccctctgagaacttaccgaggtacatttaggtatttacgggtaagtcatggcccctcttctaaagcttaaagaagatgacaagaaacatttccttcatccctgtattccctgcacctaacgcaatgccaagtgccatgtagacattcaattcatgcatgtgattgaactactctttttgactatccccaggacagcatgtgtgaaactaaaacttcacaaccactgccagtaagtggattttcactactctccagtcatcacattttcacatcctttttctggcagtctcccaaatgactatttcaaaactcttctcatctcaaaccccctctctcatcctcactcgcagctgatggccttgctatctcttngttgaggaaatggaagccatcagaagagcacttctcccaagttcctattgcccacgaactacatggatgcaaatctatgctgccttctgccctgttcacagagatggagcatctgtgctcctagtaaaggccaatccctccacttgggcacaatggcccccgctctcctactcaagaaattcatcccagcaattctgttctctcctctgactcaccaactttccagatcccctccagcagtctcactggtacacatgtttgctgttatttcttgcatgttaaaattcctctctgcccccaaatccctgtccagctaatgctctactttttcctgtctccagtggcccattctgcatagattcagtcccatcagggtttggcccccaccattcaccaaaactgctcttgtgaagaccatcagtgacctccatgttgttaaatccaataaaccattaaatcaatgttaaaccaatgatccatcttcaacttatttatcagcagcacctaaaacaattgactactcctccttcttgaacagtttcattgttgtgctcctatgatacattctcctgatttttcttgtaccacaattgctacttactcccaccttagttgctgattcctccttgtcacgccacctcttctcactggagtgttctaaagccccagcttgtatcctgttctctgctctatctatgttcatgctgttggtaatcacaagaaatctctcccactctcctatgtgctgagggtcccaagtttatatctctccttacttcttccctggactccatcatcatttgtctaaacttcctcttcagcagttccacatcaacccctaagaggcatctcaaaaataacatatctaaagataagttcctcttattctctacatccccaccccaccaacttccaatgcacaccaaacccggttcctaccgtagtcttccacaaagcacttaatggtaactccgtctttccagttgctcagagcaaacactggagtcattcttgactccttctaccacacccaatccaccagcaaaggctgatggttctaccttcagacatgacacaaagcatgccatccttctgttcagaaccttccagagggtcactgtcttactccgagcagaagctggtgtttgcaatggcaatgagatcctcaatggctcgagtccctgctgcccctccagcccactgctgcactccccatgctccatccccactacattacagctaccttgacctccttgctcttccttaaatgccctaggcacactcccgccccaaggtgtttgtgtttttgttccttttgcctgaaatattcggcctcagagaacctcaagcctcattccctttcctttttcagattttacacaaattatgtctttcaaagaggcctttcatgtccttcctaattaaatatcaattcctcaacatgttctatccccttttctattctttatcaaatctatcatcacttatcatattatacatttaatagtcaattatgtttgtttattctcctactaaaacataagcttccggaaggcaggcctttttatctgacatgcccagtgctatagccccaagtgcctgaaagaatgactgcacatgtagactgtttacacatgtagacattcgttgaatacttgttgaaaaaatgaatatataaaataagaaataaatgaataaatgaattaccaatttgctttttattctcttttgcattctgaaccctatttggagtctgaggaaatcctttccattaaacaaaaaaactagacatagattcatagatcaatagctggatagatagatattaatagatagatagatagatagaagatagacatatagatggataaagataggaatccttccttccaaaatggagaaaaaacagtgcagtaggaaagcagagggattgtttatagaaagttaggcagggccaaaagagcatatttcttctttctgagttttcaatatctatgcttccaaaacaacttttccaaaacaacaacaacaacaaaagctttcttcctctgatatcaccatactgctattaatgtaaagttatttaaagagttttattttgttctaaagaaatttagacatctacttcaaaggaagatcctaatttttcatattaaaaaattaaataagatctttgaaaattaataaaaattggggaaactgactttgcatacatgaattaacccctctttatagctaataaaatttttagaacagggtctcttcaactttgggcattaagctgacacttctcatatggcttttggctctaagtagttcaaattttttaccatttggctcaaatctgtgttagttcttctatggatgaaagaaaaaaatgtagacaataatacagaagaaggaaattaatgaaacaacagaaccttccaagctccttcctacaccaggcatcctggggctgggcctcatccagcagcccagcttctcctggatngcgcatgaggcttttggagggctttgaactactttcacaacatccgctctgctttctggcaggcaagcaaggtttggcagggattccaaaaataccatgaaagagagaatgctgtactttcagtttttactccaaatagtcagtgtgtggctcgactcaagacctaagcattggaaatgtgttccaccagagtagctacgggaagaaagggttcaccgctcttgtgacataggtcagagtaactcagagagagtttcagttggacccattaatcattccattaataacttattttaaaataaaagcagacttagccaaaagtcagtgaatgatgagctgttagaaattcctaaatatctgtatttagtgtacaacataatacgatcaacttttgctcaagttcaacttggaagtttgctcaacttcctagaagaatttccctgaagtgcattcattccagtactatcccagtgcagggatttttcttatttacggaatgcacctgcggcaaatataaacattattgttaaaacagtttccttgtttctgcatgaaactctgttgtctttgcttgtctacactcctactttggagcttttaaaacataaacatttcctctgtgtatgatatattctctgtgcaatatatcatactcagagaaaagtgcacaaatagaaaaattgtgcttaaagaattatcacaaaataaacacttccataccactactaccagggtcacagaaggacccgcacccagcactcagaagctccattcacatcccctctcagtcccatcctctcctcttcctcaaagacaaccactctcttgactgctttgaattttaaaaacaattagaaataattattatacccttccaacatgaacatgcacacatgtaccaagttctctctctcctttgaataggttgatgcactttgcttttgttcagcttcttcagcaagaccaatttccacatcagcatgtcctcctacctcctgagattaataggactgcatgacatgggtcctgttctatttcatcagccccaagcactgcacgagggatctatggaaagggctccttctcacaaatgtccagaaagagcagttccctagctgggtggggcaggcagccctgagcgggcccccaatcttctctgcttcctggtattcaaggccttgtgtaatctcctccctgaaaatgagatgacccaatgacttgcttctactgaatagaatactgcaaaagtaatgtgatgtcattgctgccactgggttataacccatctcactcactcactctcactgtgttgcttgctctgaaagaagccagtttccaagttgtgacctgccctgtggagaagcccatgtggcaaggaactgaggggagcctctggccaacagccagagggcaactgagaccctcagtccagcaacctgaaaggacctgaatcctgccaataattaacatgcaggagtttagaaactgatccctctccatggaggaatgaatgcagccccagctgacagcttgatcacagccttgtgagagacctgggggcagaggcatttgagcaagccacacccagattcctggccacagacactttgaaataataaatgctgattgtttggagttgctaagctttgggataatttgttacctagcactgganaaccgatacactgacagaaaagcaaaagctgctgaattcaccaatgacgaggtcacagagacccatagggaatggtaacactaattcttttcacaaagttggcccnccagtggccaggtgagggcatggtgccgtaaagatctagaatcctgagtctgctgctctgtggaaggcctgaggccacagcctttctccttctactaatgactcaaactgcacatgctctccgcggcctctacttcctgcttctcccaacgtggaactacagcttattatccgttgacagacattccatttccttgaatgtccttcccttggtattcatttcttcctgactcacggatttcgtgacagtgttcctaatgcctccagtaatccactgtcccccttggaccaccaaagcaccctgagcacatctcaaccagagtatttttgcacttcattttaatcatgtatttgttttcctctgtttctacaccggtagagtccattcaatggtcccagtcacctagaatagtggctggtacatagtaagagtcaggaaatacttgctcaatgaaaactttactcactcatatcagctatcacagacaaagaagacagtaaaatcccaacacgctatgacatattacattgaataatcaaatatattcatcagcttcgtacatactgtgaaatggcggccagtgatatcttttattatcgataaaaattttaatattaaataagagtgaatttctctgcatttgtattatctttgtataattaaaatttactttctttttccattctggcctcatttttgtagccttttagggtgttcagatgttctactgactaactgggacgcctaagagccactcagcctgcctttgtagccttgtcctttcaattgctgacatttcttcctggaaaatgacttaagttcttaatgccaaaggccacagacaaaacaaaattcacttacagaatctatcaaagcttttcagataaatcgtctgctaaatcaggagcattttacaaagtatcctggcctccacctgttcatgttataatctaaatgtgaaagcaggacacttttgttatgaagaaccatttcagctcagggagggcctgaaaatagcttcagtacttcctgtacactttcccttattcccattgtgaaaacatctgctggtctattaccacagagtgtgtacttcccactgtcgggctctcatggtgctccttggctgcagtgcccacagctgacaatcactacatctttgctgcagctgaaatcaagacatttccttctggatgcagtcctgaagactggtacccttgtatgaatcagatgaaaattcgagatcttatttatacgactgtttattctcaccagttgatgatctctgtctctcatcaacatttattgaaccaggtactgtgctaggtataagggttaaaaaacaaattatgcatggtccttgctgtccagaagcttaaaatttgaaattttatatcagagtgaatgcaaacatcaaggcctattgtgaaaaactgccttgggcgctactgtgtgaatgtcctagtgctttaagaacgtcaagatcatcttgccctataaaggttatatttacttttacagcccttccctgcaaccacacaaacatgctgtgattagcaagaatctctctgcagaaccagccgttccttgccccacatccatagagttcatccacaatttgaaattttgttacctttaatgtgctattcaatgttcggattttgtggagtttctcgtttatagatggatttttacaccgcttaacaaaggattttctcaactcctttttagtcgaaggtcgtcggtccccaagaggagatagactagcttgctctaatgatttgtacagcttctccatttcatcatcttcagacacttttgtctcttctatttgaaaaaaaaaaagaaagcagtaacaataaacccagtgaaaaatcaaggagagaacattcaatactgtggtcccaaggcacggccccactggcaccctcatctcagacttctctccggaactgaaagacaataaatgtttgctgtctaagccacccagtttgcgatactttgttactgcagagccacgttccctgtgaaggcaccagggaaggagttattccaagcctctctcctggcttcaagtggttttttggtttgtggcagtataactccaatattcacatggggtgttccctgcatgcatgtctctgtgtccaaactccccctatttatgagggtatcagtcatgttggattagaaacctgccctattaactcatcttaactagttaaatctgcaacaaccccatttcccaataaggtcacattctgaggtattaggggttaggacgtcaacatacgaattttattaattaattaattaattttattattattttttttgagacggagttttactgctgttgcccaggctaaagtgaaatggcacaatcttggctcactgaaacctacacctcccaggttcaagtgattctcctgtctcagcctcccaagtagctgggattacaggcacctgccaccatgcccggctcatttttatatttttagtacagacagggtttcaccatgttgcccaggctggtcttgaactcctgactttgggtgatccgcccaccttggcctcccaaagtgctgggattacaggtgtgagccaccacgcccagcccaacatatgaattttagagggacacaattcaacccatacatagtccacctccggcctcctaaattcatgtgtttctcacgtgcaatatattcacctcatcccaacaactccaaaagtcttaacccattccaccatcaactctaagaccaaaagctcacccaaatatcatccaggctgggtgtggtggctcacgcctgtaatcccaacactttgggaggccaaggcaggaggatcgcctgagctcaggagtttgagaccacacttgacaacatggtaaaacccgttgtctactaaaatacaaaaaattagctgggtgtggtggtgcgtgcctgtcatcccagctactcaggagactgagacacgagaatcacttgagcctgggaggtggaggttgcagtgagctgagatcacaccactgcactccagcctgggctacagagtgagactctgtcacacacacacacacaaaatatcatctaaaccaggtattgctgaaactcagtgggggagtgattcatcctgagacaaaattcatctccatctttaaacccatgcaagtcgacaaatatctgcttctaaaacacagtgtgggacaaataagccctagcaaattatacacatgctaaagtttgagaactactgccctagatgattgcttaatgtccttcccagaactacccttggagagaagaaacctgtctgtggtctgtggttttgagtagaaagtgatcattcctcatcttgccacacagactccatctcccttcctaaccacactttgccagcctcggcccacatgattgcagtgaagccactccaccacaggatctactggggaccatgtggactagacgaggccaatggcagttccaccattctggccacagtcactgattcagagataaacatgtgcctctggtcaggccatttggggccaaggagactcagttccaagactttggagtatcagataagtaatctctcttttttcttaagctgaatgttgtgatagtgtgagctggaagtttccaggaagtatcccaagaataatgatatggaagccaacccattctgagacacagatcttgatgataccgttggagccctctcagcctgtgggagctaatatgttacccatgttaagctaccctggctttggtttccaatcatatgcacctggaagggcctcaaatgatacagaggttactcaaagaaaatcttcatcctttgatgttgctttaatttctcactaagaacgttagtctatttttcctttattccttggaagaaagcttgggaaagaaatacaatgagatttctttttccaccacatactccttaatgtttatatgtttcacttcctgtccaaagaaccagcttgaaagaggactctatagaaagtatggcattagaggaactagaaaaacagcctctccatagggtggagaaaagcatataatggtgacctaggagcatcaaaaccaagcaaacttcacatgccttagagtttactcctctacgattagaaacctttatgcaagaattagtttcccctatccatcccagaaagtcaccaatactctttcataaaacagaaagcaaagatgatgcactcacttcatagctgacttaaaatgttcatcagcacaacctcctttttctctaccaaaccgtctcacaaaagggaagaaaatactcaaaactacatctgaagacaattagacttttggctcacaccgtgtgcagacatcaaaagtgggcttttgtcaataagcacatgaaaagatgctcagtatcatcagtcatgagggaaatgcaagccaaaaccatcatgagatgtcccttcacacccagggtggctacaattaaaaagacagacagtagtaagtgtggatgaggatgtggataaattggaaccctcatacattgttagtgggaatgtaaaacagagctgctacttttattttattgtttattttttaaagacagggtcttggtctatcacctgggctggagtgcagtggcatgatcatagctcattgcagccttgaactcctggactcactagattctcctgcctcagcctctcaagtagctgggactacaggtgcatgccaccatgctcagctaattgagttgccactttagaaaatagtttgtccatttctcatggagtttagcatgtgccccagcaattacactcctacataaatacccaagagaattgaaaacatatattcacacaaaaattgtacatgaatgttcacggcagcattattcataacagactcaacttgggaagatcctaaatgttcatcagctgatgaaaggataaacaaaatgtggcatttgcatgtgacagaatagtattcaataattaaaataaatactcagttgtccacaatacttcaacatgggtgaaccttgaaaacattttgctaagtaaaagaagccagtcacaaacaaccacatattgcgtgattccatttatatgaaatgtccagattagatgaacccacagagacagaaaccagaataataattgcctggggtctgggaggggacaagcaggagtggagaatggcagctaatgtgtaaggatttctttttgtgatgctgaaatgttccaaaattagattgtgatgacagctgcacaattccaaatatactaaaaaccaatgaactgtacactttcatgtgtgaatgttatggtatgtgaaatatatctcaataaaactataaaaagtagtcatttatgagattgtcatgagagctgatgctacatagcagaaatactaagcatggccacagtcatggggtcaagctggagacactggaaagtcttaaagaagttaagtggaaagaaatctgactcctgaaggggggcattaggattgaagacttagagttttcagttttaagacacagtaattttacatgtccttttactttttaaaaaaatacagctaacaaggtagaattctacttagattaaggcataaacacatagctttcaataccacagtatttttgaattaaggaatatatgtttaacaaacatcaacaagcaaaccaaacaagagtatgacaaagataaatagaatggtttctttacatttctctgtgttcaccaagtagctacattgtgctactaaagattgtgatagaaaacaacttaccaattgagccactaaaagaaaaaaatatttttgactaaaacattttgtttgtaattatgtcacagtaaaaattattatcattgcttccaagatagccaaataggaacagctccagtctacaactcccagtgaaatcaatgcagaagacaggtgatttctgcattcccaactgaagtacctggttcatctcattgggactggttggacagtgggtgcagcccatggagggtgagctgaagcagggctgggtgtcacctcacctgggaaacacaaggggtcgggggatttccctttcctagccaagggaagccatgagtaaccgtacctggaggaatgatacacttctacccaaatactgtgcttttcccacagtcttcgcaaccagcagaccaggagattccctcccatgcctggctcggtgggtcccacacccatggagccttgcttgctgctagcacagcagtctgagattgtcctgggatgctggagcttggcaaggggaggggcatccaccattgctgaggcttgagtaggtggttctatgctcacagtgtaaacaaagcagcagggaagctcgaactgggcggagcccactgcagctcagcaaggcctgctgcctctctagattccacctctgggggcagggcatatctgaacaaaaggcagcagacaacttctgcagatttaagtgtccttgcctgacagctctgaagagagcagtggttctcccagcacggcattcgatctctgataacggacagaccacttcctcaagtgggtccctgaccctcatgtagcctgactggagcctcacctcccagtaggggctgacagacacctcatatcagtgggtgcccctctggggcaaagcttccagaggaaggatcaggcagcaatacttgctgttctgcagcctccgctggtgatacccaggcaaacagggtctggagtgcacctgcagcaaactccaacagacgtgcagctgagggtcctgtctgttacaaggaaaactaacaaacagaaagaaatagcatcaacatcaacaaaaaggaagtccacatcaaaaccccatccgtaggtcaccaacacctaagaccaaaggtagataaaacctcaaaaatggggagaaaccagagtggaaaggctgaaaattccaaaaaccagaacacctcttctcctccaaaggaacacaactcctcaccagcaagggaacaaaactggatggagaatgaatttgatgagttgacagaagtaggcttcagaaggtgggtaataacaaacttctctgagctaaagaagcatgttctaacccattgcaaggatgctaaaaaccttgaaaaaaagattagatgaatgactaactagaatagccagtgtagagaagagtttaaatgatcttttggtgctgaaaaccacagtacaagaacttcgtgaagcatacacaagcttcaacagccgattcaatcaagtggaagaaaggggatcagtgattgaagatcaaattaatgaaataaagtgagaagacaagattatagaaaaaagaatgaaaagaaacgaacaaagcctccaagaaatatgggattatgtgaaaagaccaaatctacatttgattggtgtaactgaaagtgacggggagaatgggaccaaattggaaaacactcttcaggatattatccaggagaacttccccaacctagcaaggcaggtcaacattcaaattcaggaaatacagagaacgccacaaagatactccttgagaagagcaaccccaagacacataactgtgagattcatcaaggttgaaatgaaggaaaaaatgttaagggcagtcagagagaaaggttgggttacctacaaagggaagcccatcagactaacagtggatctctcgacagaaaccctacaagccagaagagagtgggggccaatattcaacattcttaaaggaaagaatttccaacccagaatttcatatccagccaaactaagcttcataagtgaaggagaaataaagtcctttacagacaagcaaatgctgagagattttgtcaccaccaggcctgccttacaagagctcctgaaggaagtactaaacatggaaagacacaactggtaccagccactgcaaaaacatgccaaattgtaaagaccatcaatgctaggaagaaactgcatcaattaatgggtgaaaaaactagctagcatcataatgacaggatcaaattcacacataacaatattaaccttaaatgtaaatgggctaaatgtcccaattaaaagacacggactggcaaattggatagagtcaagacccatcagtgtgctatattcaggagacccatctcacgtgcagagacacacacaggctcaaaataaagggaaggaggaagatctatcaagcaaatggaaagcaaaaaaaaagcaggggttgcaatcctggtctctgataaaacagactttaaaccaacaaagatcaaaagagacaaagaagggcattacataatggtaaagagctcaattcaacaagaagagctaactatcctaaatatatatgcacccaatacaggagcacccagattcataaagcaagtccttagagacctacaaagagacttagactctcacacaataataatgggagactttaacaccccactgtcaatattagacaaatcaacaagacagaaaattaacaaggatatccaggacttgaactcagttctgaaccaagcagacctaacagacatctacagaactctccacccaaaatcaacagaatatagatttttctcagcaccacatcacacttattctaaagttgaccaaataattggaagtaaaacactcctcagcaaatgtaaaagaaaagaaatcacaacaaactgtctctcagaccacagtgcaatcaaattagaattcaggattaagaaactcactccaaactgcacaactacatggaaactgaacaacctgctcctgaatgactactgggtaaataacaaaatgaaggcagaaataaagatgttctttgaaaccaattagaacaaagacacaacgtaccagaagctctgggacacatttaaagcagtgtttagagggaaatttacagcactaaatgcccacaagagaaagcagggaagatctaaaattgacaccctaacatcacaattaaaagaaccagagaagtaagagcaaacaaattcaaaagctagcagaaggcaagaaataactaagatcagagcagaactgaaggaggtagagacacaaaaaaccctttaaaaaaatcagtgaatccaggagcttttttttttttgaaaagatcaacaaaatagatagaatggtagcaatactaataaagaagaaagaagaatcaaatagacacaataaaaaatgataaaggggatatcaccaccaatcccacagaaatacaaactaccatcagagaatactataaacacctctacacaaataaactagaaaatctagaagaaactgagaaattcatggacacatacaccctcccaaaactaaaccaggaagaagttgaatctctgaatagactaaaaatagcttctgaaattgaggcaataattaatagcctaccaaccaaaaaaaatccaggaccagatggattcgcagccgaattctaccagaggtacaaagaggagctggtaccattccttctgaaactattccaatcaatagaaaaacagggaatcctcccaaactcattttatgaggccagcatcatcctgataccaaagcctggcagagacacaacaaaaaaagggaattttaggccaatatccctgatgaacattgatgtaaaaatcctcaataaaatactggcaaaccaaatccagcagcaaatcaaaaagcttatccaccacaatcaagtcggcttcatccctgggatgcaagactgcttcaacgtacccaaatcaatagacataatctatcacataaacagaaccaatgataaaaaccacatgattatgtcaatagatgcagaaaaggccttcaacaaaaatcaacagcctttcgtgctaaaaactctcaataaactaggtattgatggaatgtatctcaaaataataagagctatttatgacaaacccacagccaatatcatactgaatgggcaaaaactggaagcattccctttgaaaactggcataagacaaggatgccctctctcaccactcccattcaacatagtaatggaagttctggccaaagcaatcagacaagagaaagaaataaagtgtattcaattaggaaaagaggaggtcaaattgtctttgtttgtggatcacatgattgtatatttagaaaaccccatcatctcagcccaaaatctccttaagctgataagcaacttcagcaaagtctcaggatacaaaatcaatgtgcaaaaatcacaagcattccaatacaccaataacagacagagagccaaatcatgagtgaactcccattcataattactataaagagaataaaatacctaggaatccaatttacaagggatatgaaggacctcctcaaggagaactacaaaccactgctcaatgaaataaaagaggtcacaaacaaatagaagaacattccatgctcatggataggaagaatcaatatcatgaaaatggccatagtgcccaaggtaattcaatgctatccccatcaagctcccactgactcttcacagaattggaaaaaactactttaaatttcatatgaaaccaagacaatcctgagcaaaaagaacaaagctggaggcatcatgctacctgacttcaaactataccacaaggccacagtaaccaaaacagcatgacactggtactaaaacagagatatagaccaatggaacagaacagaagcctcagaaataacaccacacatctacaaccatctgatctgacaaacctgacaaaaacaagcaatggggaaaggattccctatttaataaatgttgctgggaaaactggctagccatatgcacaaagctgaaactggatcccttccttacaccttatacaaaaattaactcaagatggattaaagacttaaacgtaagacctaaaaccataaaaaccctagaagaaaacctaggcaataccgttcaggacataggcatgggcaaagacttcatgactaaaacaccaaaagcaatggcaacaaaagccaaaattgacaaacgggatctaattaaactaagaagcttctgcacagcaaaagaaactatcatcaaagtgaacaggcaacctacagaatgggagaaaatctttgcaatctatccatctgacaaagggctaatatccagaatctacacagaacataaacaaatttataagaaaaaaacaaacaaccccatcagaaagtgggcaaaggacatgaacagacacttctcaaaggaagacatttatgcagccaacagacatatgaaaaaatgctgatcatcactggtcatcagagaaatgcaaatcaaaaccacaatgagataccatctcacgccagttagaatggtgatcattaaaaagtcaggaaataacagatgctggagaggatgtggagaaataggaacacttttacactgttggtgggagtgtaaattagttcaaccattgtggaagacagtgtggtgattcctcaaggatctagaactagaaataccatttgagccagcaatcccattactgggtatatatccaaaggattataaatcatgctactataaagacacatgcacacatatgtttattgtggcactattcacaatagcaaagacttgtaaccaacccaaatgtccatcaataatagactagataaagacaatgtgtcacatatacaccatgggatactacgcagccataaaaaaggatgagttcatgtcctttatagggacatggatgaagctggaaaccatcattctcagcaaaatatcacaaggacagaaaatcaaacactacaggttctcactcataagtgggagttgaacaatgaggacacatggacacagggaggggaacatcacagactggggcctgttggtgggtggggggctgggggagggatagcgttaggagaaatacctaatgtaaatgatgagttgatggctgtagcaaaccaccatggcacatgtatacctatgtaacaaacctgcacgttgtgcacaagtatcctagaacttaaagtataataataaaaaaaattatattaaaattacatatctgattcaatagatattaaatcagtaaagataaaaataactttagaatcttaggataacatggcatataatatattccctacatgaaaaataaatggaactttctttttgatagctttattatttaatgtatttacatgaagatatatgacctttatgttaaaaatatcgaagggtatcttcctccccctcttccatttctttttctaacttaaactttgggttgggcaactgtgtatatgtaaatacaacttgatcttccaataaataactaaactttaaaattaacaaacagataaagtgaacctgttggggtaaccagacatgaaaacagaattcacctaaaatttcatatattatgctcaaaaaaaccaatatcttcaatttaaattaatccaaaaatgagataatggcaagaagtatgtatgttcacataggattaaagctgttcagaaaatgaggaaataatgaaaggcaaattatcactcagcttcctgcctctcagccatccctctctcctcagagaaagcctggaactgaaagactgtgtgtctgacctctaataacctgattccagaatcatccacaagcataaaacagtaaaataataaattctggtgttaggaatcaagaaaatacccttattggctgttttgtgtgtcataatctaagaggtctacaacatatcactaaatactcaggggatgcactgtgccccaggtccacgacccagtcagggacattacattgtttttattgttgctaatggctgatgcttaggtcttcacagggccataaaatgaacatccagtggaagcaggtgataagtaggatcacaggacaaaaacagacccaaaaggtacaagtgcaaaagaaaacacagcttgtacctgaccccaaagcaaatgtgagaatccttctcaattgctatactaagactacagcaggcttgtcaaacctttctggctacccttgtacctccaagaggcttttcagtaaagcagtattttaaaaatttcccttttgctttttatatatttttctaaattagaatttcatagtagaaaacactacattatttctcttatcttacaagatcataaagagcgaggaaaaaagattggcagagaagaccgcttgtctctctcccattggagacgggagccaaattaattatttccgcccccccttatcttctgaagcaaaataaatgaattttgtctgacagtcaagtgtttccaatgcaatttttatccttcctttctggagcatattttagtcttcctacataaaacagcaggactttgattctgccacagaaggcactttaaagtctgtcttatctcacctcacaagtgttttgtcaaggaagatgaaaactatttttattttatggatgagaaaaataaagattccggaaaaacagtaagtgatcttttcaaaatgcaaattagtgatggagttaagaataaaagttcactttcacaccgtgcagaatcatgcccttctagaccactcctctcaaacttttaacaggcactcacctaggaaccttgttaacatgtagattccatttgagttcatctgggattgtgccgagattgtaaatttttaacaagctcctaagtgatgctggaattgctggtccatgaaccatactttgagtagcaaggccagcctgttagcaatttttcatgcaatgctagcctcaagtcattggaagagaaagcaactagagttacaactagcacactgagatttgtccataaagcagcactctgtattatctcttaactgaaaaaccaaaacaagagaatgaaagaaaatttggctttgctcaaaggagtatgtccaaaatccctgcttaaaagtgtcagtgcctcataatgttgagttggtgcgaatttgggttaatgtcagtgacccttcacttttgttagactagcttaggatgtctcaaggggtcagactcctaaactttcttcaaacttaggtcagctacctaactagttagactcaagaaaggagacatatatatatatatactgagctagtttaacaacaacaactatatatatatatatatatatatatatattttttttttaaacatgatccttcttggtgacattagcaaatgagacaaaacaacatttttagccaacagttataagttcactcctttccaagaccctgccaaatgaatgtgctgctcccttctcctcctcttccataccccagtctattgtctgctctgacagcacaggcatgccccagtaggcccagaatttggctgtcgagaacactgtatgcagattatctctttaaatgctatattttcaactctgcctcccccactatcttatttttggtctttccttgtgctttctagaatgtggctgtttattttctacttagaacctaaatgctggattcagaagacaggaggggaattcatatgccatatttcttatcagaatttgaaaggaaatttgtttcagattaggaatgtctaaatgatgtcccagggaagataattttagttccccaacatgcaacacttggaaaaatttaggtagaaaacagcgtttcctgttcatatgcaatgttctaagtgcctgagaaagaaaagaccgtggaaggcacttgtcaccaagagaagaaaaaactatatagtcatttgggtattttgcataccctaaaggtatgcaaaaccttaaaaggctttacacatgttatttaatatagcacctgatgccaaaagatcagaagaattgtataggctttctccaattagtaaatttgacaactctacaacatagcaaaagatttgaaatcataatgatatatttaaattatttaattaagaaaaaaatctggataactcattttagtagtgaggacactactgaccaacaacattggcatagtataatttgagagagaaatctcctatttttgttcctgttgggtagagataacgatcatacattgagtttttactatgtgacatgcactgtgttaattcttagaccaacgttatttcattatcttttaacacttctatgagaagtgttaaattaaaattctttcaccaaattcacaaagagacaaacctaggttgtgactccaaagctcgttttcttaaatactatgctttaaatttacatagctatactatgctatgaatatatatatttgatgcgttcttttgaatgaaagtcagtgaagactatatatttcaaattaggcaatatatagtcactgagatagcagttgactgaactggacagaccaaggctcagatccctgcttgaactactgcatcttcaaagggagcaatccccacccggagcctctgctgctgaggttcccaggttttgtacctcaaattctgtctccacagggccgcagggcacgagacctgagagcagaaaattgataagccagccagcaatctaggacacaaaccacaaaatcagattaccttcttggggacttgaactggacacttggggatcatgaaccagttgaatcaaaagcagaaggtaataatcataaatacatgtgtacaagactgcagccatgtattaaacagaggtatgagtgcttagaagatgagaacgtcaagttgggagaacactctagttgggaaaggtgaggcgattttaaaagatggcaggtttgtaacaaacctgcacatctgcgcatgtatcccagaacttaaaattaaattaaattaaaatttttaaaaaagatcacaggtaaaagaaattccatgagaaactgaacatattaagagaaagagagagagaacacccaagtataaagctaatgtttttacttgtgctctcatgaatctaagacaagagtagcttcattttgatttccctcattttcctctatttgttttaccttctctgccagagtcatgtacgtatcttctttcatgtgtttgatgtttctgttaagacagctcaaggctcttctactgtattattgcttttattgataagaacaatcctagtctattgggtgatctttaatggttgttttgctgttgttattattgagtcttgaggcaatcgttttctgaaataatcttaagttgactccattgctcaactatctgattaagtagctttatattcttaaaacaaatatttcatttgtttttaaattttattcttccaaatataggagcacccaggattaggcaagatatttaaagtagacataaaattactatgtttcctcatatgctaagaaaacagaaaacgttggtgtacatacaaaaaagatatttgatcgcctttttttcttcttaaaatacgtttatgaggtatcagttgaatgagaacaaaatggtagcagtgggtgggaagctggaaaatgacctaaattctaggatacgaatccaatgcattgtagataaatatgttagctgtggcaccataacccgctggatccatcaaccatgtggatccatgatggggacaagtgaatacaaaaggtaaaaatgaaaattttagaaaaaggaaagggatgagactagggaacacttcaggtcaagaacagggaggcaagagaaaggaagaagttagcttatctcaatttcactaagcagaatatgaaggctgaacaaataaatgcccttatcttttttttttctttttttttgagacggactctcgctctgtagcccaggctggagtgcagtggtgtgatctcagctcactgcaacctctgcctcccaggttcaagtgattctcctgcctcagcttccccagtagctgggattacaggtgtgtgccaccacacccggctaattttttgtatttttagtagagacggggtttcactgtgttagcaaggatggtctcgatctcctgacctcgtgatctgcccatcttggcctcccaaagtgctgggattacaggcgtgagccaccacacccagccacctttatcttttcaagatggcgctctcattcacttatcgctatgactattatctactgcaatctatgtacttgcataacatgacctaaataggtagatataccatattcatggatgacttaatgctttaaagatagtacttcttgccaaattaatctaaacatttgagaacattttgaccaaaatccaaaaattatattctaaataaaacctgaaaattaaattcacaagattacctgaatgatagtgccaaggagaggtgcgctctatagaataccaaaggatgctataaaggtatgttctaactaccatactgacaaagtgataaaaagaaagattgggctgggtggtggcttacacctgtaatcccaggactttttgaggccgaggcaggcagatcacttgaggtcaggagtttgagaccagcctggccaacagggtgaaaccccatctgtaccaaaaatacaaaaattagccaggtgtagtgcatgcctctagctacgtgggaggctgaggtgggagaatcacttgaacccaggaggcagaggttacagtgaaccgaggtcatgccactgcactccagcctgggtaacaaaataagaccctgtatcaaaaacaaacaaacaaaaaaaacaaaaaacaaagcaaaacaaaaaacacaaacaggaaaagaaaaaaattgttttgtggtcagaacatttaagcaaatttcaagtacacaatgtagtactgctaactctagtcactatgctgcatattcgatcccctgagcttattcattttatagctgaaagctggtacagctgttgttgttgctttatttaagagaaagttttcagtgtatctcaacatttgaagaattgcttggtccaagggcaagtacacttcaaatgttgagttacactgaaaactttctcttaaaaaaaaatagctgtatcagctatctcaaaatgtaatagcactggcatataaagtgatacatattagaatgtttactgtaacactctgtaataataaaaaattggaaatcacctacatttccatcttttggagaataaataatactactatactagtagtagtataatattcacaccacagaaaatgatgcagttatcaaaaataacaaggtagagctgcatgtactaacaaggaaggcttatgtggaaaaacaggctacagatggatatctgtcacctaattctatttacattttttttaaaagaccaatggtatatgtgtgtacatctatgtatgtgtatgtatatatatatatgcgcattggtacatagaaaaaatacactccaaattgttaataaccagaatgcaagatccagaacacaaaaattgtaggcatagtgcctataacagatattaccaattaataaaagtacaatatatttttttcgaatgaatgaatggtaattttagtgatgaagacatgttagcattgggaaaatgctggtaaaggaaatctttattttttcttggtatctttccagattgagattttatcaagtatagtatctttctagattgtttgagattttatcaagcatgttataataattttgtaattaaaacttaaatacagataaaaataaactcttgcctacccctttcagataatgttataatgtgtcacaagaaacaaacatatttcttggtaataaaacaaaattatttgtaaagtactaccagggccagcctgtctgcatatagccctttttcctaaaaagtaaaaaaatcatcctaaagattagagatttctgatcctgctacatggcatgactagctagtccttcaagttaaaaaatatatccattggtgataaagaaacatattgaatattattgtcccctgagcctcttaccatgatatactcagctgtatgtgaaaggattttgagaaaacagagcctagcaaggggtctcatgccaatgggtcctgccaaggaggagggtcttctgtatttccagggagcagctatagacatggagcttaatgactgcctaagtgttcaaactgccaaggcacacttcattccaaatatgaagatattcacaatgtacctttcaaatatttagaaaatatttctaacaggtactttgtaatttttaatggcaaaaagttagagtttagattgtgactgttcataactgccatcacttgcccccaaactttacaaatcagttcagtgttactttacatggttaaaggtctagtttgtatggctgatataatacatgctatgtaaataaatatggtcataaaattgctatagatttggctttgattttaacacaaaatatgccatatgcttattataaatatttagtatcaagttctatattatgattacctcaattcctcaacagtcaacttttaatccgggggtgtccaatcttttggcttccctcggccacattagaagaagaagaagaactgtcttgggctacacataaaatacactaacaatagctgaaacaaaagctaaaaagaaaaaaatcacaaaaaattctcataatgttataagaaagttgatgaatttgtgttgggccacattcaaagctgtcctgagccacaagttggataagcttgtttaatcttggctttttgctaaaagctaaagcatttggctgatacctttcctgacttagcccccagaataacgacccttttggttccccttctcccttaacaggggttattgcttgtgttctttgcggcctatcaatattggggcaccccagagctcagccctgacctcttccttctctgtgttctctctccccaggtgatctcaattagccacaattcttcaaatacaactatatgctgaagattatccattttaaatctccaagccctctgctgaagtccagactcacatatccacacagacttgacttctctacctggatttctgtgaggcatttcaaattcaacttcaaattcttgatttatatctccaagtgttaggtcttttccatctcataatatgacaactctattattttagtcattcaggctgaaagtcttgaaatcatctttgacttctgtctttctctttcaaaccgcatgtcagcaaattccattgtctcattttaaaatatacacagcatctgactgctttccatctcaacctagtgttttgttgctagcaaatcccatcacctccacctgaacacaggcagcagccacctcgccgcctatcctcctttcgcagatgctccctcatgtccgtgcacggagccagagcagctcctttctttctttttttctcttttttttttgagacggagtctcgctttgtcgcccaggctggagtgcagtggtgcgatcttggctcactgcaagctccgcctcccgggttcgcgccattctcctgcctcagcctcccgagtagctgggactacaggcgcccgccatcacgcctggctaattttttgtatttttagtagagagggggtttcaccgtgttagccaggatggtcttgatctcctgacctcgtgatccacctgcctcggcctcccaaaatgctgggattacagacgtgagccaccacgcccggcccagagcagctcttttcaaatttcagtgagatggcaccgctcctccctgcagagggaaccctgcagccacttcccctcccacttttgagtggaacccagagtgctcaccgcctacatggccctacatgatgggatccctgcccacttcttgcacctctgctcctggccacacgccctccactctacacactccacactctgtcttcctgccgctagtcttcaatcacctctagcactgtctgactgcacttgttgtgtttttgcctggaagactcttccccaaatattaatttggctcaccctctcccctccatagttttctgctcaaatatcgacttatcagagagattttccaggactaccaatgtaaaatcacacaccccaccccataccccacctctgtccagtctctctctaacccccttgccctgcctcttgtaaaaaaagcatggcttttaacaaccaccgaatctatcatacgtgctgtttcctactgtttccctaccagtctctcccctcagtgttagctctgtagggctgtttattttggctttcgtttgctttttgcccagctcatggcatggtgcttggcatataaaaagcacttgacaaatattgttgaatgaatggagttcccacacccagagatatcataatagtatttacatgctcctgtttctagcattaggtgggtgacctgtactacctcaccagtagttattgaaaaacatgtaatatcatgattgtcgaaggagagaaattatcttagttatatatggcttggctcacatcatgtctcactcaaccctgtgtcttgctgattattcagaattattcttaggtattaaggcgattagaatctcaggctgtggagtcaaacagaactgcatttcagatacaactttcacacttactagttacatgactgttttaagcaatttacttaatcagtttaagccccagtaaaatagaggtatttttcttcttccataaaacagaggtgatgaaaaagtacctacttctaacttggtggcagaggtgatgaaaaagtacctacttccaacttggtggtagagcagaaacacagaaacctttcactctgagatcaagcaaccacaaaaatgcccatgattgccatttctatcagcattgtactttgggtctacccaaaacaagaaaaataagtagcagatatagtgtttggaaaggaaaaaagcaaaaccattatcatttgtagaaatatgatcatatacataaaaaaatttaggataaattactagaattaaaatgacaatttagaaagtttgattcttaaaaatgcattttaaaaactaattgcattcatgtaaaccagcaatagttataaaatgaaaaagagaaaaatcgatgttaaaaatagcatttaaaactatgaaatatatagaactaaatctaacaaatatgttcaagacttttcatagaaaatataaattgtgaaatttattataagatgtaagaaagacaaataaatggagagaggtaaagagaccaatttcatgtactggaaaattttagaccataacgatttctgtttcccccagattgaatctaaaaatgtaacgcaattcatgccaaagtcccacagactgtgtgtatgcacgcatgtgcatgtgtgtgtatgtgtgggtaatttcactgggtgattctaaaaggtatatggaggttaaaatggccaagagtatcctaaacacccttaaaaaaagaacaaagtaggaaaacatgtgttaccagattttaaaacttattttgtaaaaagaatggtatgagccagggtagaaaaagtggcccactgggtagatgaaagtctaaaaagcaccagcactcgattcatgagaaagatgacactgaagactcatgtggatgtttgggagaaaaatggcgtgtacagaaatgatactaggaaaattatatttgcatatggagtaagatgatattgtatctcattcatggaacacatcaaaataattccaagtggactaacgtttataaaatatggaagaatatctttaagataccagtgtagggagaaatttcttgataccaaaaaaaagcatttaaccataaaggaaaggatagataattttaatcactttaaaactgagttctatttattaaaagatactactttacaagaaaagtgaagtaaaaaagtagaaaatacatttgcaatatgttaaactgacaatgaaggagtatccagaatgtatacattcctacaaatccattggaaaaacaaaaaaacacctataaaggtatgggtaaaagagtgaaataaacactcttagatgtgctaatccataatcaagattaccacctgccaattttgcaaaaattcagaaactcaactttaccaatgaggatgtggggctttgagagcgctcatccatgctgaagagatgtattttggtggaaccaatttataaagcaatttcatctagtaaagttgaagataggcatacatcatggccagcaattccatttccaggtgtatacccgtagagaaatgcaggcatatgtggaccaaaatacatatgtaagaattttcattaagagcatttaaaggcaagccacagactgaaagaaaaaatgtgcaaaacacataaataaaggacttaataaatagagagactatagcaaataacaatgtagtatatagttcaagatagctagaagattttgaatgttgttaccacaaataaataataaatgcttaaagtgatggatatggtattacccagatttgatcattacactagtataatgaatatattcatgcattgaaacatcacaccgggccaggcgcggtggctgatgcctgtaatcccagcactttgggaggccgaggtgggtggatcacctgaggtcaggagtttgagtccagcctgaccaatatggtgaaaccctgtctctactaaaaatacaaaaattatctgggcatggtggctgtaatgggaagctgaggcaggagaatcactggaacctggaggttgcagtgagccgagaatgcaccactacactccagcctgggcgacagagtaagactcagtctcaaaaaaaaaagaaacatcacaccgtaccacattaatatgtacaattgttatatgtcaattataggtaagaaattaaataaaaataaactataaactatcttgtagacaataatgtatcatcaaactgaatattctgctctcatgtacttcctatacttatattgactcagtttgaatctggtcccaaaaactcacaaaatataagactgtcaccaacatcacataagcaaaaatcattaacttgtacatgtagagtaataaaatgacgtttcacattaaaaatattattcatatacacacacatacaaagattcaaaagaaaacaaaaagctaatggaaaaaataggcaaaagatctcaacagatacctcaccaaagaaagtatatacaaaaattaataaattctgagcagccatcttatgttaaagaaaagaaggcatataaatagcaaaaaagcntatgaaaagatgctcaacatcatgagtcattagggaattctaaattaaaacaataaaatgttactacccacctactagcatggcgaaaatccaaaacacagaaaacaccaaacgttggcaaggatgtgaagcaacaggaactctcattcattgatggtgggaatgcaaaatggtacagccactttgcaagacagtttggcatctcttatacagttaaacatactcttaccatacaatccagcaattgtactcattgctatttaccccaaagagttgaaaacttgcatccatgcaataatctgcacccacatgttgctagcagggttattcataattttaaaaacttggaagctacaaagatgtctttcaataggtgaatgaataacaaactgtgatgcatccatacaatggaatattattcaatgattaaaaagtgacctatccaggagatcgagaccatcctggctaacacggtgaaaccccgtctctactaaaaacacaaaaaattagctgggcgtggtggcaggtacctatagtcccagctactcaggaggctgaggcaggagaatggcatgaatccaggaggcagagctttcactgagccgagatcgcgccactgcactgcagcctggacgacagagagagactccatctcaaaaaaagaaaaagtgacctatcaagctacaaaagacttagaagaagcttaaattcatattaccaaatgaaagaagccaatctgaaaagggtacataccatataattgcaactatgtgacattctggaaaaggtaaaattaaagaggtagtaaaaaagatgagaggttgtcaggttcctgggagaagggtagaaggatgaatagatggagcacaggggatattttttacggcagtgaaactagtctgtatgatactgtattagtggatacatgacgttatacatttgtcaaaacccatagaactgtatgacataacgacataaagagtgaaccccatgccaggcgcggtggctcacgtctgtaatcccagcactttgggaggccgaggcaggtggatcacctgaggtcaggggtttgagaccaacctggacaacatagtgaaaccctgtctctactgaaaatacaaaaattagctgggcatggtggcgagcgcctatagtcctagctacttgggaggctgaggcaggagaatcgcttgaacccaggaggtggaggttgcagtgagccgagatcacgccactgcactccagcctgggtgacagagtgagactttgcctcaacaacaacaacaacaacaacaacaacaacaacaacaaagagtgaaccctaatgtaaaccatagactttagttaataaaaaagtatgaatatttattgccagttgtaacaaatgaaccatactaatgcaaggtgttaataatagaggaaattgtgtatggaatggagggggtatatgtaaactctgtactgtctgctcaatttttctataaatcaaaaagtgctctacaaagttaagcctattaatttcaaaataagaatctccacagcagcattttacataagagcccacaactgaaaaaaaaagtgttcaccaatagtagatacatttattgttgtatagtaaaacaatggagtactataaaacaatgaaaatgaatgaattccggctggataaagaggatattacaaagggtttctgcattatgcctgcacttctctaggggtatacacctggaagtggaactgctggccatgatgtatgcctatcttcaactttactagatgatgacaaattgctttctaaattggttccaccaaaatatatctcttcagcatgggtgagcactctcaataccccacaccctcacaagtaatttgctggctgatttctgtttcttgacccaaatggtggccacgtggttactgtgtgtgtgtgtgtgtgtgtgtgtgtgtgtgtgtatgcatgtgtgtgtatttatggagtattttagatagagagagaacactcttctatgtatatgatacttttcagtataattaacaatttccatgaaacagaagaaatgatgaagcatataaatatcgagtcatgaaaagaaatggaaaaccaaacatttgaacttaattaaaccaaaaagcttctgcacagcaaaagaaacaatcagcagagtaaacaagcaacccagagagtgggagaaaatcttcataatctgtacatctgacaaaggaccaatatccagaatctacaaggaacacaaacaaattaggaagaaaaaaaaatgacttaatcctatcaaaaaatgggctaaggacatgaatagacagttctcaaaagaagacatacaaatggccaacaaacacgaagaaatgttcaattagtgatggaaaccactaattgccagggaaatgcaaatcaaaaccataatgtgataccaccttattactgcaagaatgtccgtaactaaaaaataatagatgttggtgtggaggtggtgaacagggatcacttctacactgctggtgggaatgtaaactaggacaaccacactatggaaaacagtgtggcgattccttaaagaactaaaagcagaactacaatttgatccagcaatcccactactggatatctactcacaggaaaagaagtcattatacgaagaaggatacttgcatgcatgtttacagcagcacaattcgcaattgctaaaatatggaaccagcccagatgcccatcagtcaacaagtggataaagaaactgtggtacatatataccatagaatactactcagccataaaaaggaacgaaataatggcattcacagcaaccttggatggaattggaggccattattctaagtgaagtaactcaggaatggaaaaccaaaattgtatgttctcactcataagtgggagctaagctatgaggatgcaaaggcacgataaaatagactttggggactcgggggaaaggataagagtgaggtgacagataaaagactacaagttgggtacagtatatgctgctgagcaaaatctcagaaatcaccactgaagaactcattcatgtaaccacacaacaccacctgttccccaaaaacctatggaaataacaaattaaaaataaataaaaatacgcatctatctgcatatacttgtactctcctgctaaggagtaaataataaaaacttcaataacatcaaaaaagaaagaaaaccaaggatttaatcaacaacaagaagttataagaaagagaagaaaaattgaagacccctctgataactttccaaccctctacaccgctagaccacatgataagcaaaacaaacacttcggccttgctgccagacagacaaggaggagaggcctgtgacaggtcactttggctcaaagccacattaatttagaaatgaccccagcatcaaacatgacaatactccctatttttttcttccaatgctgttttccatactctatacagacaaaaagtgctcaaaaaactgttgataaaacacaattctagtagcatagtattaaaagggatgtccaacataacagacttcaaagacttttttttgtcatgacatacacagtttacatcataataaatgtggtattctgggcaggaatttgtgaccatgagcagtggtacacctagcgtacttaacgcccagggcagatcactgttaatacccgctcctcaacgtttcaaactgttttacatctaaaatcacggtggctcatgcctgtaatcccagcaatttgggaggccgaggcgggtggatcacatgagatcaggagttcgagaccagcctgaccaacgtggtgaaaccccatctctactaaaaatacaaaattagccaggcgtggtggcgcatgcctgtaatcccagctacttgggaggctgaggcaggagaatcacttgaacgcaggaggcagaggttgccgtgagctgagatcacaccattgcactccagcatgggcaacaagagtgaaactctgtctcaaataaaataaaatcctcacctctaaatttattcctttctgagtggaagattcctcttaccttattcacattctgtctcttctgaacctactaccttcctttttcaattatgacctccaactcctcaacccctcctacttctttcaaactgtcatcgccactctaagcttacgtacctccaaactctagattacacttgtcaccatctcccatacctttgccccagtgacttcctaccacctaccactcctaactcctagcttcaggaaaaattgtaggaagtaggatgaaaaacaaaggtaatgtaaaatctaagtactatgaatggcctacttaaatcacacaaatctgcaggtaacctaatcagcataacttcatgacaactcatagagatctttagccacctgacacaggatcagagaaagcaggtggtgaatcacccatgcctgagatcaatgccattgatgccaatgatcatatattcaaggttttcccaacatcaaatgatacttcacaaaacaagattactaggtaatgttctaggaacaaaattaagtgctgaggatacaaaggccaagatcagtcttcaccctgataggcatgctgcagaacccctcatctccccttccttcccgtctccactgccacctcagctgttatgcaggctccctaaaccttcttatgtcctgtctcctcttattctcttcttccctgcactctacagctaaaataatttttcttttctttcttttttttttttttttttgagacagaatctcgctctgtcacccaggctggagtgcagtggcacgatctcggctcactgcaatctccgcctccagggttcacaccattctcctgcctcagcctcccgagtaggtgggactacaggcgcccgccaccacacctggctaattttttgtgtttttaatagagatggggtttcaccatgttagccaggatggtctcgatctcctgaccttgtgatccgcccacctcggcctcccaaagtgctgggattacaggtgtgagccaccgtgcctggcccagctacaataatttttctaaagcatacttccaactcaccctgatgagaaatggtcatccattagctgtttaaattaaggaacacctatcccagtattcaacctcaaccaaatgtcctttccatcccctttacccacgcctcccttctccatgtacatatcttgccacttagatgagatcttgtcttgggtccctgctctcttttaaacctctctctggagtgctctgtatctcttctgtggcacctattttactctgctttcttttgttaaatgtgtctagttcctcccactcagcccattaggtgttaacattttttagaccagaattgtaccttgttcacaattttttttttttttttttgaaacggagtcttgctctgtcacccaggctggggtgcagtggtgcaatctcggctcactgcaacctctgcctcgcaggttcaagcaattctcctgcctcagcctctagagtagctgggattacaggtgtgtgccaccatacctggctaatttttgtatttttagtagagacagggttttactatgttggccaggctggtctcgaactcctgacctcgtgatccgcctacctcggcctcacaaagtgctgggattacagatgtgagccaccctgcccagtccccctggttcacattttattcactttagcacaaagtacatcagcacatgtatgttaggtactcaaaaaaatgatatatacacaatataataatgcaaaattgaatggagtccagttttggacttattttttattacatacttcctgaggaggcatactgcatgattccaacagcaactctcaaagtagctagctaaagtactgttcacactcagattgtgtacaattttgttaatattttttaaatcctaaaatctggctcattcatgtcactttcctgaaacatcatgcatgctctagaatgcctgcctcttctttaacaatgttttattttttttaattaagcttgttatctacatgactcccagatcaattctggctgtgcttatacctgataatttatttgtataaattgggtattcgtcttatttgctgacatgcagcttttcagcatccagagtaaggtttcttcattcattaagtagaagtgacattgtctccacattgtcagcaggtagtgtgtgttgtacatatgtgacttactatcacacaggcataagtcatggttcaaaaaatttctaacaaaagaaatgaggagcacagggtaaaattgagctgaaatgaacatgtcattaaccctctcacctcttttcccattatgctttgtgaaaataatcagtgaataattcctagagctctggaacctggaactctcagtgaagaaaggcaataggaggcaattaacaccctgattttattttttcaatagcttaacactacaggagaaaatgtctaacagagtatttaaattcagcataaaatcctagcaaccacaattttaattgcatactaactgcaaaaatatttctttcattgtctaaataaaaggaagactgtaatatgtactgtctgcttgtttcaggactcagttattaatctttaagaatctttgctaggatgaaagcctcttcttccagcaaatgcatcctgagactgggacttaatcttttaaaatcctagctctcattttgaaccatgttaagatttctatccctgatataaaaacaccttgaacaatttcagacacaagaatttcaggaattttttattagtaactcaaaaacaataccttttaaaagtcacaaaaatgaaaagctacctttgtctgcaacacataaacacacatgtaaaaaaaaatgcacaatatgaaatttgattactcaacagcaagtcatcacaaatgcaagcaaagattgggttgctgtttccatagagatgactttaagtggttcagttcttctgggaatttaaccaaatccccagcagcagaagaaaatcatcagcaaaaattctgtagcatatgagaactgccaacaaatcaatgagagaaaaaaaatactttcattttcttttccnttttaccaagaggaatactgtcacattgagctgtttgaagaagtatacagattttgctggtcactctgcatgtaactcaaaactaaataataccaggttgcttcattcttacattaaaagggctggtggtacccagccaggctctacagcacatgcaatcctggaatggcatttagccaggaacaaggactgttgcatcttcccatgtctctggctatggtcctaaaagaaaaccctcaacctccagggttatctcttgggaaagaatgcaaatgggattttattctctagtatgtttttgaagctatgctcatcctggggggtgtgtgtgtgtgtttgaaatttttttagttctacttacgacccagtgattaaagtaagcgtttgtaggagaaaaataatagatgtagtactttttattattttctttagtttcaccagtcctatatctggaagtctcttctaagcatcaagatagaggtcatctagttcaagatgcttaaattctctcttcagtatatcttttcaagaacaagaggtgtgaccaatacacaataggcaatcaatattcaatgaaaatgtttgtctcagaatgagtaaagacctccagtgataaggaatgcattcctttccaaggaacccattctattttttgaagagttcacaacatcaaaaaaaagttcttatgctgagcatgaatctatctccttttgacttgcaccattgaactcaattctgtgcttccaaggagatacaattaagctcaatactttcaccaaacgacagcaactcacaaacctgagggcgggttgagactactcttcctcacagtccaatcttcagccctctccattcctcagtgacaaggtttcctttctcctccctatgctactcattcacctctagaaataggttggtttgccagactttatttactccagttcttctaatctagatagttngcctaaataaaggggagaagtataagaaaaatgccatcagaggccaggcaggtctgtgtaaagcatctttaggtaaggcctcagagagtggtgacaactgttataacttggagaattagttaccaggctgagtaatgaaatttacatacttttaaaatattacatacacacacacacacacacacacacacacacacaacttgttctgcagttgtgatccttgggcaaattacgctgataccaaaaattaaattagcagggtacccatctgaaatttgagaacttaaagaaacattccctgattaggctagaggagaggagagagcagtcatctatgtcattagacactctggcaagtgattatgagaatttagcaagtcaactttctctcaatggcacaccaaaaatatacaaaccaaactcatcattctttcactgctcagtatcttccatcaggtaagcgtgttttacagcagaatgaatagcgcacaatcagaaaagatacgtcacgattgaacagtaataaaaataagttagtcctggataaaagacaaggaccagttatcagagtattttttaaacctcatattattaacttccacacacaattaattctttcctttgttaagacttaaaatgttttctgaacgcatgagttgtgctctcctttatatgtaaaggttctaatgctgcacaaagtgcatgcaaattgtctgtcttcccatcaaccacacaggaacattcaggagccgacaggctaagaattagatactgtctggggcacagcccagagaaagtggctgatctaagctcattttgaactatcaaggtgatgttatgaataccagactacaaaatcctgatttaaccaccacaggctccagcgcatgggacatgggaccaaaaaagaggcaagttttttctccgattggtggaaaagtatcattattttatgatcacatgtcttggagttctgaagcaattggttagtgacacttatagcaagtaattagtggcctagtagctggagttgtccacatgcaaactcctctacaaagcaacctctgggcatagccccacttgactaattattgaatcatcattcatgagtttaaccattcttgttacaaattaatattacagttccatatacaaacaaatattcactctctaacgaagaataaataatttattggtttacctttgtccatgatctttgatccagcaggcttatctgggacagtaagatggtcatgattgctactcaatgaagaagtatcatcactagataaagagttcaaaaatccactttctgatgtgacaaaactgttttccagggccttgtggatgcctgcctctgagggtacaggtgaatgaacttgcacagcaaacgttattggttgtccctcatcttcagcagcagacaaactgttaactgtgtcaggcaaggattgtctctctttagataaggaggaaggaaaactgctgggtgtcttcactgtattttccagggaagagaaagaatacgacgttccactcaggctgggtgaggatgaagatgcctgctgtgcagtctatttttcacaaataaaaccaaaaaaagaataaaagacatcatgattaaaccatcattctctaccttttattttcaatcacggtgtccccgtgttatttcaaaaagtgaccaataataaaagagtcaaaaggtaaagatatgatatttatttctgtttgacacacattaggatttcattctccaaaactgatttatgtaactttaaattcactgttctaggatctgaaaaatctccttatcatgatttgtcctattcttcaatgctctccagaaacttaaaaggcctcttttgggaatgcttcagaatactgcattacactttgagcaaaatataatttgcaatctatcactgaattcacactgatggaacaagaaagataattatgaaaaaggagaggctgggtgcgatggctcatgcctgtaatcccagcactttggaagaccgagacaggcagatcacctgaggccgggagtttgagaccagccgggccagtatgttgaaaccccatctctactaaaaatacaaaaattagcctggcttggtggcgcgcacctgtagtcccagctattcaggagactgaggcaggagaatcacttgaacctgggaggcagagattgcagcgagctaagatcatgccactgcactccagtctgggtgacagagtgagactctgcctccagaaaagaaaaagagagcaaaagctggagccattccagaaacaaaatacgaacttaaacccttgaatatcgctcacatactccttagtgcatgaaaagccttggcgacattttcatcagtacacagagaaaacatcaaagcaacatcaccaatgatatggttggttctgtgtccctatccaaatctcacctcgaattgtaatccccacatgtcgagggagggacctgatgggaggtgattggatcatgggggtggtttcccccatgctgttctcatgatagtgagtgagttctcatgagatctgatagtttaaaagtgtttggcagttcccacctcactcactctttctgctgccaccatgtaagatgtgccttgtttccccttcgccttcctccatgattgtaaagtttcctgaggcctccccagccatgtggaactgtgagtcaattaaaatctcttttctttataaattacccagtctctgatagttctttacagaggtgtgaaaatggattaatataaccaacaattcttggaaagaacttcatttattctgagatttttatctttgctacattttgatgttgaaatacatgccttctttttaaaaaatggtgacagtacatataagcctttgtctctttgtctctttgtctcttttcctttctttaatgtcctatgtagcaaaataaagattcagcaactctgtcttgttcctccatttttaactttattggccaacaaaatcaaaaaatctagactccagtactctacagatcaccctatatctccaacagcagacaaggtagagaaggcattttatggttcagttgcattacatcatcctatgggacatgcctgtcaacatcaagcattcaaaactctaaggaaggccaggcgcggtggctcatgcctgtaatcccagcactttgggaggccgaggtgggcagatctcttgaggtgaggagttcaagaccagcctggccaacatggcgaaaccccgtctctactaaaaatacaaaaattagcaggacatggtggctcatgcctgtaatcccagctactcgggaagctgaggcaggagaatcacttgaactcaagaagcggaagttgcagtgagccaagatcacatgattgtactccagcctgggcaacagagtgaggctccatctcaaaaaaacaaacaaacaaaaaaactccaaggaagtgtcaggaaggttgacagagagaggaagccaaagagcaaactaggatcttcttcaaaaaccctcagaatcattgcaactaattcagaacagttgaccttcttccaaatcaatatggtccccaggaaatttgtagattctgagctctgagttttgatgggagaagccaatatttacctaatgtgtacccaatcagttccatgctagacacggattgtcagataatcaataaatacacttttaagtagcatgacattaaaatctctagttaagatactaactaatcacatatcttctcaataatcatatactggcacgtacataaaaaaaatccattcaggaatatgtcaagtaccttgtaaactggttaccttacatcacttagatctttaataaccaagagatcaaagacctataatttcaataaaaccctagttatctagaggagggaatgcactacccccaaattgtccaaataaatggcaggaatagtttactcgttagcaggatctacaaaataaatattaacaaaaatatccattctggaccagtcctgacacgttcccctattgtgagctattttagtaaaattcaacttctatgtgatcaacttccttttttcgaaacaacaccaaataagcttttcctcttactcctgctgactctactttaaattagattatagcaaactgggctatttgaacaacagaccatgtacacagttgctacaggactgtctgtaaggtttattgaacctcaaaactctgcttaaagtatcaagacctgttaaatgagcattagaaatatctgtgaagtgtcatcgtgtttgtgctatgactcaaacacagtgcaaatgctctctcaatccattttctctaggcaccaggcaccacttataaatttcatttttaaatggagaaaagaagaatgaagggaaaaaaagaaatagaagaaacacgaagacttggagaagaggaaaaggaaaatgagaaagtgactacatattcaggtcagggggagttttcattggaaaagagattgataaaatacaaatacaaatgaaagtgaacctggagtttaatttccaaggattcagtatgaaaacacgctttatagaccgtgtagtgctaaggcatggctcattatttctaacattctggagaaaccaatagccaacatcaagcatagaactcttagctcactgccttctgtgaaccatctgtgcaacatactcataaagctccccactgaagatcaaatgaaagcagaaggcagtgctagtctctcctctccgccccacctctactggtaaatatgagcccaaccttcgtgtgtctgttcaaacaccaactcctccaggaagccttctctgatagtctcggggccaggtaggtgctttgccnggtgcttctgcggttatttctatcataataggtggaatgtcattttgtgtatcaacttacacagttgtcccttgaacagtagggattcaaactgcacaggtccacttaaacacagatattttccaataaatacagtcagccttctgtatccatggattccaaatccatgactaaatggggatgaagacagcgtttgtgggatgcaggatgagaaactcaaggatacagggagccgacttttcgtgtaggtgggttctgcaggacccactgtgggacttgagtatgcacagactttggtctccatggggttcctggaactaaacccccacagataccaagggatgactggattgcaactactgattgactcttcatctttttgatgagctacctgagaacaggctggttttaatcatttttcacctccattttttgcctcttgtttgacacataattggtgacaaattaatgacaaagaattggccagaaccagctttgtgaagaaaagcgccccagagttattcagcctctgggggaggagctccctgaaatcctccataaagttgctgagtgatttatccgaatcccaggatcaaggggctatcggtgccaattacaatgcaaatagcctgacaaaatgttctcataacctcagataaaagtattattttatttagttagtgattaataattgtatgtggtttcattcctttcagaacacttaggtattaagtattttatatttaaatgaggaagttaaagacatttcaaaaatcttcgttctagttaagagactatgatatgattacattaaagattaatactgatttttcctattttctgtataggatagttttaattcttgaagaagcatcattcaaatgttagccctaaaatccttttcttggaattgtttttcaaacacaagtttgacatggtgaaaaaatagtttaaaatggccacccaaaccctgtaattaggcagaagtgagtcagcatagaaatcttaaggagtcaaagtacatggaaacaaaaaagtctaaacaaaacaaaacaaaaccaaaatgacaagaaaggaagaaaagtacacagcttccctttccttgtattggccatattagcaaaaacaaaaaataaaccagtcaattgttgttaagccccaggaagtatcatgtttgtatttctcctatatgccaggagaagcatcaccctaaataccagaagaccttgtaatagtacactccttctctgtcactgaccttctgcatgaccttgggcaatgtgctgaccgaagatctactcatcactgtgatccttagtatccatgtgaccttgaagaagtcattttacctgcaagtaccattctagtggcttcctgccttatcagtgccccccatcccaccccagtccatcctccaaaccacagatagagtatttctaacacacacaaaaagtccacaatattcctctgcagaaaaccctcttataactgcccatcttaagtagaaaaatatccatagtattcattagagcttagaaggtccacatgaacccctaaggactcctccacctgcatctcctccctccttctccactcctttctagccacactggccttctttctgtcccatcaccacatctctggtcccttctgccagaaaggcttccctgtggatgttgggtggacggcctccttcccattgcttggacctccactgaaatatcacttcttccacagggtcttccatgacagagcagacagagcagtatcctctccactcccaacccctggccactccctagcccattgccctacttcatcttcagagcatttgtcagtccttgaagtaatttgtttgaattattactgcattgtccctcttcctcaacacagaactcaagatgctcaagggagaagacaccatctagttccattcagcatccctgtatttttttttaataaaaacagctttattaaaacattggctagatgtggaggctcatgcctgtaatctcagcactttgggaggccaaaacaggtggatcacttgaggtcaggagttcaagaccagcctggtcaatatggtgaaaccctgtctctactaaaaatacaaaaattagctgggcgtggtggtgcaagcctgtaatcccagctacttgggaggctgaggcaggagaatcacttgaacccaggaggcggaagttgcagtgagccgaaatcacaccactgcactctagcctgggcaacaagagtaagactctgtttcaaaataaaaacatacacacacaaagaaacacattaatttattatgtattattatttaattagttacctaactagttagtgtatatgctgctgaatttgagcggctgtgtattgtagaaatatttcagaggacaatgaataaactgcaattaggacaaggtgcacattttccatttttgtttaccccaggctgccacttaaaatcaaatgctatcatatttgattattccttcctttctaacacatcataaagttttgtatctccatgcttctgcttgtgttcctccaactaggattacaatagcagacccttcggaaactcacccagatcccctttacctggctatgctgcagccttccccagctgctgctaggcctgaaactaatggcttacatctgaggcttttgccaaaggattaccttggctatcaagagatgccaggagactttattctcaaaagctcttcatggcacccccatattggtaacagtccctagcacatggtaaatacacaaaaatatttatcagctgcctgactaactcaaatttatcaagaggggcaagtgatatcccataaagaatattcttcatgaaacataagcagcttgcaaatgctacttccgatagctatgtgtatttctctggaacctggcttcctcatttgtaaaactcatacaagatttctgtgagagtcaaatgaaatcattcttctcaaagccatgcaaaagcactagacaagtggaaagtagtatatttctcattcacatggggaaatatttgtggaacaagaaatttgcgggggttgtggatgaagtcacaataatcactcacccatccatctgtccattaaatgtttatttagtttcaaatgtgtgctaggcacagtcataaatgatgtgggtaaatgaaaagatattgggcactggctctgactttaagaatttaataattagagaaataaaccagatacacaaaatctctaatcaaaagcagattgtgataacaacatgaaaaaaatcatcaaaaaaagaaacactatgggaatacagagagttcagaagagggaagaattaccctgacctagaggactagagatgttctcatgaaggaatctacatctgaagctaccattttgaaagatacttagaaggtgggattggggtgggagtcaggggcaagtggtcctgcaagtggagaaactttatacctacaggtacgagggcaggaatgtctggaacgcttttggggaacagcaggccgtttgttgggctgacgataagggcaaaattggcagcaagactgcaatggcagcctgaagacaggccaagggcctaaaataccaagccaaagactcaggagttaatttaagaagcaatgagaattcactggaagcttttgtgcaggtgaatcaatgtgatcagaaccgcatcttaggaagactaattgggaggtggtttttaggaggagagagagagggactagagacagggaaagaaaaatagcctgctatttcaataactcaggtcagggctgatgagggcctcaactaggcagtgggagcagaaggcaggagagaggctgggggagagccaccgggctgcgtgactgactgccaggagagcaggctgtgaatgaagatgagctgttaaagccagaggcaaaaatataaacacgaattttagcaaagtcttaaaatcagttagatattcaaccatatggcttacaatcattttttgaaatcttgaggagaaagggtgaatttttctgtctacctttttcttgtatatatagtcactgagaatttttcacccaactatccacttgcagttctgttctttcatttagtacagatattgaataatcaaatgactttggtagacaactnttcaagatatgtcttgttaagattaaatgtgaatttccaaaattaatttcacctccttctgtgtttaaactttttggggttttttttgtttttttgtttttctgtaaagacggggtttcaccatgttgcccaggctggtcttgaactctggggctcaagccatccacccaccttggcctggtggaaactttgacttcctcctctgtcgctggccaagggccacagtttgcaggatttatttttccttattgcttcttttgtttattttagctgatttttttttcctcatttcaatatttaaaaaactacttcagaaaaacatcaaaatatgaggattgttgtgttgaaataatctgcataagcttctagaagctggaattagaaatatttatctcctctgtttgtctcatatttgatctgcctatttgatggtctaccttccaaacggattcaaaatctaaccattccatttctctgccaccccactgctatcccgatggaatcgctgccatcttttgcaatagcttactgtataccctctcttagttttctgattctatgcctacctcccacttcccagtgtctgttgcacagagcagattgggggctccatttgaaatggaagttgattatatccctcctctgctcaaacctttcaaaggctccctaaagtccttaactggcccatatgccctccacgatatggctaccactatgctttggcttcatttcctactactctcatcttggttcaccccgcgtcagccacagagggctccttgcagtaccacacaccaaggagaccttgactctcactgttccctttgcttggaaaacttttcccccaaatatccacttggctgactctcacaccacctttcaaggtttcgctcagatctcagctctcagtcggacgtgtcctggctcctctattctttgccacaacccaatctctaccccatcacatcctgactcactggactccacttctgatgtagcatatattttccttattatgtggattttttattaacagtctccctcaactagaggtttggctccatgatgaacatgaatcacagtccactttattcactgatgtgttccaagtatttagaatgctggctctcaataaatacttcttgaatgaatgaatatgcccagaagcatagaccaggttatctcatgatgcttttttaaaattaaacttgaaggaaaaatacctggagtaaatttttagtgacttttatagctcttaactcactttgtagcttataaaattatcagatttgaaatagaaagttggttctttttgctcttttgtgaaactaaaggaatcacagataatgatttctacaaattgtcttccagagtgaaactaaaagactcacatctatttggagccttttcagtaagcctgttaaaagctgcccacttgcaacttctttgagaataaatggatgttctttccactatcaaccctctgaaaccttctgaagaaggaggaacataacataaaaacctcttcttcactgaaggaagatttcctgacatgttctttattatctcgtgaaatgtcattcagcccattagaagcagaagtccaaactggtttcattgtttatcttgactctatagcaattagaatgattagactgaattaaatattttcaagattttaaatttttttgaattttccaaaatagtattattttatactgttgagttcattatcacaaaatggaagtacatcacccaaaataaaattttaaccaaaaacttggggaaaaaaatatttttgcccctaggcttgtatatctaagtcatcgctagcctatactgtattgggccaaacactagctcaattcactctctgcataaaagctatgactgagtgcagtggcttacgcttgtaatcctagcactttgggaggccaaggtgagtgcatcacttgagctcaggagccacagaccaacctagagaacatggcaaaaccctatctccacaaaaaaaaaattcaccaggtatggtggtgcacacctgtagtcccagctactcggggggccgaggtgggaggatgacctgagccaagggtgaggctgccttaagttgtgatcacgccactgcactccagcctgtgtaacagactgagactgtgtctcaaaaaaaaaaaaaaaaaagttactatatattttttttatttcatctgtttaaataaaaagcctaaatgttagtttaaccaagtgccttccatgtctgtttttcagaaagagaagaaaacaaaaacaaaatctgtctgggaaatatgtgatcaggaggaacacattctgtttctaagggggaaaaaaaatctaactgttcaacgtttatctgacgatttccaatatatttctttagaaaatgttagcattaatggcctgccaaaaaatgctcaacttagaacttctaaaaaataacatttgattgatgattcaaaaaatttaaagatacttctgagttcagtgacctaacttactggcttcatgagtatcccttcatttatttattttaaatcaagtattccctgaacttctattgtgcatcaggttagactgtcattatataatgcaattgagccatgaccccttgtctaagaaggcaatttggttgcttttatttcaccagggagagttctagaaggccctccatgatatggctactcggttgcttttatttcaccagtgtgttctagatgcctgacaatgctcttagcaaagtaacctgagatactagtttgccattataaaactgaaaatgccagtattttacaactaaataatcataaaaagaggtatattggtgggcacagtgtgagggagaatgaacttgaggaaaaaatggagggagaacaactaaacatttgtatgttacaggttaaaataggagagagacacagaagcagacatagagacaaagacagagacagagagaaacttagcaaaaatacataatcctctcttaaatcaacaacaaggaacattttttgaagacctattcaatacaaagttgataatgtctttagaggcattaaagggtaaactaatcagaaagttgtcaaaagctgagaaacattgtaaggtctgaagatatcattaagtttgaaagatataaagaaaataaaagctttttctaaaatccaaaattgatttttaaaaaggagaaggattacactggggagaagctatgaatatagtaagaaagaataatattataaatgtagttcaaaaattgttctaaattttaccatattcaaagtttaattttatttatatcttgcttaattttggctaatcatatttaatagatagtttaataaacatttattcaacaatatttatgtcttttcttggctgctagccaaataaattagaaaatgaccacaattctccactgacagtgtgaaaaaacagtagaggtcattatttaaataatcaatataataccttaaatccaggaacttgcaaaacacaataaagataaaaactatcacactgaacagaaattctggcagaaaaggtctggtaagtgaatgagctactgtaacctgtcagaacttgccatcatttgggtctataatggacaggtgtcatggttcagtagaaacagcatgtcctggctgggtgcggtggctcacgcttgtaatcccagcactttgggaggccgaggcaggcggatcatgaggtcaggagattgagaccatcctggctaacacggtgaaatcccgtctctactaaaaatacaaaaaattagccgggcgaggtggcgagcaccccagctactcgggaggctgaggcaggagaatggtgtgaacctgggaggcagagcttgcagtgagccaagattgtgccactgcactccaggccgggtgacagagcaagactccatctcaaaaacaaagaaaaaaaaaaaaaaggaaaagcatgtcctataaagctaaacagactgggattcccatctcaggcactcactggacacttgagcatgccattcaacatctctgaacctcagtttccttaaccatgaaatgaagacaggaatatctacttcctcatgacctagaataggaaacaatttttgaaaccagtgggaaaaaaaggcactcaccacaatgaaggtgatggataaatctgacatattaaaatcaagaacatgtgtttacaaagagaaattgtggaacagtttnaaaaagattaaaagtgacatttgttcacttttaataggttggtgcaaaagtgattgtgttttttgcattatttttcatagcaaaaagcagaactacttttgcaccaaactatagctgtagagctgacaaaggactaacacatagaataataaattaagaaatcctatcattcataaagaaaaaggaggaggaggaagcagctaaaaatgtaggaaagacttagacacttcacaaaagagaaagttctaatggctaacaaacatgagaaggtgcttggcctcattaaatgcaatgcattaaataaaatgcaaattaaatcatactacttccagggttgcctggagaattaaaagtttatgcatttaaagcacctacatacatcctagtacatggtaggtataaaaccaaaaatcaccttccccaatgatcattgtatgacccttcctcggggccattactgtaatgctaagagcatctaaatatgaagctaactctccatagacttcacattaattaataatgtgaacttacatttggtgcttccaaagcttagaatcaaatttgaattcctctctagtgaatacacaaatcgctccatgtgcacttttaatgcactaaccccactcctgacttcctgctctctttctggctctccttttttctttctgctcttttttcatcctaaattcattttgcattgttatagtacatgcacataggcaaggcatttaaattcttcctgagaaaaagtagaacataaataaacactgtcaaagaagtctttgcaagcactggcctgtcacctagaagcctttgcatcctcatgaattctctgagtacggtacatcttcgggtcacacacaaatataccaagtttatcataccactgggttgctatggagaaggctcaaaatcagcaccctgaaaattgcacttgctcgttggcaggtatcttaatttagcccattctaaaaatttattggtcaagctacttcctattcaattggaagaaatgacatccacatgtctgatcgatgaccaacagactacttatgtcggtacataccaaagactgagtctgggaagcgtgaggagggggtggtgtctccgcagctatttctggatcttcctgttcactttcactgtaacattctataacaaaaatgaaaatgcttaatgttttaacgctgtcatcgcttattccataatgcatgagcagaggtttatctccatctggctattgcaatttcaatccaattcagaaagttcatatctaatgaactacctggtaactacctggtgcaaaggaattacataagaggcagaaacaaatggccaattcggggctcctgacctcaaagagcatccaatatgcaggaagaagacaaatcgtagcttggggaaaataaaataattcctcaaaagaggtgtgagtcataataccaagagaacacaaaatcagtggtgattaattttgattgtaggaatcctaatgaattgaaactggcaggatcactaaactatcagtggtgcacaacttgtgaaggggagtctctggctgagggagcaggctgggccaagtatgtggagacccctacaagatatggcagaaaacgaagctagaaggtggtggaggccatgtcatagaaggccttacataccaggacaaggagaagttttgtgtgtagttttgtactaactcacaatctataaatagacaatgggtacttattttatggaaaagaggaccaagaagatggctaggacaccaccgatttcatggtattgcacggtacccctttactgtttcaaatcaagttgccacttttccatttctaactaactctaagattttatgattttgttatcagaagatataactccctgcttccaatttccaaggccttttgtggtctgggcatttcagaaagactatgagttcagtggccctggcagctaaatcctccctcttctcaacactaaggtgtaatcacatcattaagaattagactcctgtagcttttgaaccctgaaagctaccgactgagctaaaaatatggcctgtgtcccagtatgaccttcaggttcctggtacaatcttagggtaattagcctcagtacacacctggtggaaatattaaaatatcagggaggaaatagtgggatgaaagttaactgaccagatcatgacgagatcatgtctatcagtaagaattccacaagtggagcaattaaacatttgcatcggtgactgtttgagatgtcatgaagcccacagctgccggagtgtgggtgaagtgtgaaaagcattcatagccagcatgggaagctctattccatgttggtgagtctgtgtgaatatgtctgtctccacatattttcagatcatcttaaatgccaaagcatgtttcctcaggatcagactatacatagaacttgacattgttttttcaccctgtttcaacctgttctaatattcttgctaaattttcagaaatttaaaatagaacataccttcatcctttgtagtggattcctgatggattacagccgatccaagtttatttaaccacctaaaattcaaatagaaagcaaatgttgaccaaagagattagccccccacccattcaccttcccccagagtttgttatgaaattaggtcatgattctaccatcagtctgcacatttccagaaagagcataagtttgtgccatcgaaacctaaggcctctggtttcacaatactttccatactcaaggtatcttttgtaaggtaagatgtgaggtggcccattactcagttggttcatgagggcagctaaattaggtattccaaatatatgaacaaacacatcttctgtaatcctgcatttgaaatttttagcaaccatcaaatcctttatcactggatttagtaacttggctattaaagttattaggtgttactcttaataatgtcttaataatgtcagtttattttagaaaaaatgtacgaaaagatcatccatttaatccaggaatatttttatgtcaatcagtaaaaaaaatctggctagaatttaacaggtatttttaaactagaacaaattttaattccttgaagaattttatgtaaggtaaaaattgaaaatgtcctatttaccattttactggcaatgaattccaattaaacatcaataacaaaaatagaacgagacagaaactcaaacttggcttatcactgcagaccactgtagttccttctcaagggtttacttaggaacatatcttgaaacacaaatttttaaaagctgggacacaaagtgtgtctatgacatatactcctaactatataattttctacttattgggaggatcttgcttatttctgtacctattttgagacagggaaaatccgtgctacacgtttatcaattcgtctatgcttttgatgtcttccagtctcccatgggcaatgaacaagccatgaacaattcagcatactacacttgcactaagccataaatattgcaccttcccacctgtataactgtcagataattaggaatccttacgcaaccctcaacctgccatggtcttgttgtacctgttatttttgaatagaaaatatataacaaattcaatgccgggagcggtggttcatgcctcccagcacttcaggaggccaaggcaggtggatcacctgaggtcagaagttcaagaccagcctgaccaacagggagaaaccccgtcactacttaaaaaaatacaaaattagccgggtgtggtggcggaagcctgtaatcccagctactcgggagtctgaggcaggagaatcacttgtacctgggaggtggaggttgcaatgagccgagatcatgccactgcactccagcctgggcaacaagagcgaaactccatctcaaaaataaataaataaataaaatttaaaaaaataaacaaaataggagtttctaaagaacaaagatgagctccagcctttgttaagaaatcaccttcagcacataataatcacaaactccttagtagccacttaaaattggaccaatgaagagcccagatacgaaacaggaacccaaaaatgtatatcaagtctcaataggataacaggcaaaataaaggaacagaaatttacagagaaatcaaatagctagacaatatgcgaaaaaaatttctcagcctcaatagtattttgagaaatgcacactcaaacacaggaaaatattttcaccactggattggaaaaaacttaaaaatattattgatttcaagtatttagcaggaaacagaaaaagaagcattgtcaccttttgttgaattaaacatgaaaactgatacagccaattctgagcaggcaatttgatgataatattaaaaatttaaatatccatccccttcacccaacaattccaatcataaatatcaatcctatagaaacacactttcatatacacaaatgtggcagaatgttcactgccaacaaggcttgtaatggcaaaaagaaaaaacattaataagaaaatggataaataaattatttattctatcaacactgattctatcaatttcctgttataatgaagctaatgagaggactaagatgggggtggggggtggttgtaatgacctggaaaagatatgaacaaattatgaacaaatatatcttctgtaattgtgcctttgaaattacaaatttccaaatttgtaatggaaatttgtataaaatggaaaaccctaatatactcttaattgagaagatcaagcatagaatagtatgtttagcctgatccactgtacttcaaaaacgatatgtttttgtatgtgcatgaattggtatgcatagaaaagtgtcaggaagaatataattttactgtttaaagtgatggccgggcacagtggctcacacctgtaatcccagcactttgggaggccaaggcaggtggatcatgaggtcaggagttggagaccagcctgaccaacatggtgaaaccctgtctttaccaaaaatacaaaaattagccaggcgtggtggcacacgcctataatcccagctacttgggaggctgaggcaggagaatcgcttgaacccaggaggcagaggttgcagtgagttgagattgcactactgcactccagcctgggcgacagagtgagactctgtctcaaaaaaaacaaaagaggagggtaacctcttcttcccctaagtggcctcaggtgatctgtgaaaatggtttgctattcacctgacccaaaaaancccataaaaccatgcaaaccaagaggttcaaatctttgtgttcactttaagaacacctgtgaaattccctaggctatcaaaggtatgcatatatgaaaagccaccaagttatctgaaagatgtcactttacggaaacaacgtgtaccattccagccttccaagggtggagttggtaggtatgcacaggccaaacagtggggctggacacagggctggtggcccaacaagaatgctgcatttttcctgcacatgtttaaaagtgcngagagtgatgctgaattcaagggtttagatgtagattctctggtcactaagcanatccaggtgaatgaaacacccaagatgggccactgtactttcagagctcatggtcagatgaatttatatatatgagctccctctgccacatggagatgatcctcgctggaaaggaagaaattgttcctaaaccacaagaggtggctgcatggagaaaaaaaaaaaaaagtgtcccataagaaactgaagaaacaaaagctcatggcacgagcatcgattcagcataaaataaatgcaaatgaaagcgcacacacacacaaaaaaagtggttagccctagggagggtagttgaattagaaagtgaggtgaggatataggaaatcttttgctttgtctgacacgaatacgttttatgtattattaactaaaataagcatttaaaagttcattttttaaaattgaccaggcaaaacataacaatttcatggttcactttttaaaataccacaataacaatttttagcttataccttagttcataattgtataagtttattctccctcaaaaaagcatctaaaagtgaaatagggaaaatatttttttaaagagacaaaaaaattgttttcacttgagtgtctgaaacaagaaaaggcatttctaagctcctctcccaaacatggaaatagagcaaaatagaagactgttgacaataaagaaaatatttctctcagcccttacccaaaacttgtaaccttttcattacaaccattagttacttgctgtgaaaaactggtgatgtttagaatcttgtttgactgttttctttctaggatccactggcttagagtaccttctttgctaagaactttttttaaaacatcatggcagcaggaaaacatctatctgtggctaagtagatggatgcactaaaggacttatatttacataaaagaaaatgacagatgtttcctgggagtttgttgtatattaacttgacgtgaatgtgtgtgttggaggagaacaagttttaagaaattgatgtacaaaacaagagcattcttcccacagtgtctgagaaaggcagctcccgtctttgctgagaaacgaactctttcattacccttaattacttacccctgtacttttaaattgagactcactacagaacatgcggagtttctactaaacttaattacatttcccttcatcgtccctgagagaaatgtcactatccagaaatgcagttgcccagggagaggaacttctaaaacaaggactcatcactgcaaacgctacccactccctcccccacacctctcatcttaccaagtaatacccagatacattatttcctggcttaaaccggctgcatcagtaagaagggaagttcttcatgtgttattgcaaagtaaatctctatcatctgcataatcttgtgggagaagggagaagttgcattgttggctactagaaaagtcatttttagaataatgaaactctataatgatattataaacatgagaagttattataaatttcaggcccagacaaaatggaccatttagccggatggacaattttcaagtctaaaggtcactgacagattcaaaaacatggggtccagacaccttaagttcaaatttcaatttgcatcttctttgtaagctggaaagataacccccaaaagaatttcaagtaaaatgaacagatcttcatagcatagataggcggtaagatcttgacgttgataactgtgaaagactttgatttcacagccaacaggatgaagtatttatatcatatctacccatgcaactctacttaccattagataggtttctgcaaagggagaacataaaattggaagataaataaactggaaatgtaaataaacactggggcggtgaggagggggatctgggatttacagagcaaacgtgcatgaaatacaacggattcagataaacatggaagggtctcacactttcatcggtttaaaaatgcaccttactgtgtaggaggagaaattcactaggtaacaaacaaagcactgagaagcaattgtttctctgctactctgtctcactcacctcttgctggagagaggaaaactacttgcaaggaatcagccacagaatgagtgggaaggacgggccaaggatggaagctggagctacaaggcacttttaaagaaaagccaggacagcaggaggtattgggcaggggagaggcgggcagcactgtttcaccaccattcaagaccagaaaagaccatttgggatgaactgaggctcagcggcggactgacctcactatcacagggctccaagtgctagcgggcgagaccttgtgccttccacatcccacttacacagcaagggctttgctaaccaacaggatttagcaactgatgcaaataaaaaaaaaataagtaaagatctttgatgtggagattttaacatcctctccattcgtgtatctgttcttatttttctcagatgcttaagaaaaccaaggggataaaaaaaagctaaaactagaaaaaggatagaaacaacttctctctttgtccaagtaaatcaaagctttgtttggaagactcaactgtccgttccttgccttgttatttctaacacagagcttcccgactttctacagtacaaagccattctgtcctcatctggagggtgatgctggggaggtgaggataggggacagatgagagtccttctagctggacagagctgagcggatacctgtaaggagtgtgtgtgtgtgtgtgtgtgtgtgtgtgtgtgtgtgtgtgtgtccatgcacatgtttggtgaaaggcagttgctttttttcttcatgtttctagagcaagagagcaatgagaactacatagggcagataggtaaggaaatcattataagtaaaacaggttaagcgtaagctctgtgaatggaggaattatgtgtgggtttttcattgccattgcccaccatctgctgcaatggggcatgtggtaggcgttccattaacatattttcaattggtcatgtgaaataataagagacactaagaattctgagaatagggctaaatcaaanagaatgccctctgatatctccaatcagcacctcaaatacagcctgattcaaacagccattgttgaccaggtgcggtggcttacgccttagttccagcactttgagaggccgaggtgggtggatcacttgaggtcaggagttcgagaccagcctggccaacatggtgaaacccacnagaaacacaaaaaattagctgggcatggtggtgcacgcctgtaacttgggaggctgatgcaggagaatcattcgaactcaggatgcagaggttgcagtgagccgagatcgcaccactgcactccagcctgggcaacagaacaagactgtctcaaaaataaataaataaataaataacagctattgtgatcacacctgactctaaaccattaggaatggtgtagggcaggttgtactctgcacacagcccacttattttcacagaccaccctggaaatggagctagggatctacaattttaagtttgatgtactccgagcaaaggcgttttgcaatatgttcaggacaatacatggagaggtgataaatacgtgaatcatcacgataatcacacagcatatattaaacgctatagcaatattttgcatgtagaattccgaaagctgcaagatcagttacataatactttcaagcctctctccttgtgatgctgattctccttttaacatgttcttttaatgacttctgtccactcctttttcaacttagtggttccccgaaatagccactttgatacatgtaattctccaaaccgtttccaaatactagagaagaaagcacgaaggcattgtaactgctaaataaattaatccttaaagtaacagaaataaaataataattgatatggacatatgattagaattccagtaccaggctaaagttaagtatattcccattaaggatggggtttaccagtttcctctacttacacgttcatttcctgcacattctcagctgcaaaataaaaggtcttgatctgtggatggctgatcttaaaagcacttgaaggaggaaaagcacaaacacatanaaaattagtgtttatagtcaacaatgggtctgaaagtaaatcagtaaaatacaagctttgtaaacttgtctgctttctttgtaaatttacaaaaaataatttagtaatattagatacctattgtctagtctctgtttcatatagagaactaagagtcaattttttatgtcagaacgtccagaacagggctgagtcttagctggtcagtagtttccatttaaaacatataggtatggccgggcacggtggctcacgcctgtaatcctagcactttgggaggccgaggcgggcagatcacgaggtcaggagatcgagaccatcctggctaacatggtgaaaccccgtctctactaaatatacaaaaaaattagccgggcatggtggcgggcacctctagtcccagctacccgggaggctgaggcaggagaatggcatgaacctgggaggcagagcttgcagtgagccgagatcatgccactgcactccagtctgggtgacagaggaagactccgtctcaaaaaacaaataaataaataaaaaataaaacatataggtatatcctcttcctttcacttgctaactgctttgctataaagatacaataaattcaattttaaagtgatagaaataacacttcaaaatattcagaacaactacttcaagcaaggtatttcttcactttcaatcaaatatacagaagaatttttataggagaataatcaggtatggaacgtccactctgcagcaacacatcagaaatcttattcaaggcaccctttgttagtaaagggaaatatgaaatagattttaatataaaagaaaagcagaaaacattgaagataacaaatgagaagggcttccactttaccctttaggcaggaagtcctgcagcacggcacaggccagggtttttgtaaatagccaatccttttcaaaccacaagaatcagcactggacatgtgcaaccacaccacagaggcaaagacttaaagctaacaccagtttactaaccttgttaaaagaaaactactcaattgctgcaactagtcacataggacaaaaaggaaggcccctttctgataagactggaaaagatgtcaaaggtagaagaaataataagaaaaaggtgaaaatggacacatacgcaaaatatagcagactgctatcatgggaggagcacttgaatgagagtctatagatacctgggtttacagccagcccgctcatgagatctaagcaggtcacaaactctttgggctgtttccttctcaggaaaaccaggaccatgagctggtaattttttttggtccctgtcagtgctcaaatcttttggatttcaattagatcagagtgtaatctccaagcttaagacatctcagaaaattcaattccaagtgtgcatctgacaactccatgaactaagaaagaaaagctggtcttgctggcgtatctgcaactcgggtgagtcctatttaactgcttgttttttctttagtagaaccgaagcttgacatctgacctccctgccagtcctggagggggtttattccatcacagacacagtcatcaacaacagtccatgccaagacttcgtgggggttttaaaatccatctgctccacaaaacgaaattccagaaaatgagaggttaaatgcttctatttctatgtagggtgccaacccataatgcttcaaattctcagacattccgatgttaccttcactcacttctaaatcaccatatcccttggtgaacattatgaagagatagtatcctggctcagagttttgtggaagatgagagacaacttactgctttttcttgcattcagatgctctttccacagtgaaatcaggcaggttgacaaatccatcagctttctctgcctgaaacaaatatataccacaaataggaatgaatgcatcaatcctggggattagtgcattgagatcatatacatggaatagggatggtataaatgacatgagggagaatcaagagataccaaccaccctgaatcaccatggaggtgtcccagatacacagctcatgagaaagattaatgttctcctgataagtcacccagaatctttccaagagaagtggcatgacatgacacagcttagggatggtcaccatatggcaggcttagggcctgtctccaccggcctcctgtctctgtggaaaacatagctaacccaacagtcatgtctgctgagcccatcagcatccacagcatcttctattcctacgactctagtcagctagcacacaggaagaaacctaactagcattcttgatatatatggtgcccagagccctggagttagcaaatctacattcctatcatggattgaccacttactggttgttgtgacttaaatgagctcagataaataaaactgctaagagtcactcaacaaacattatttcctctcccaagtctgtaggcagggccttggggattaaatcacagagctgcatctttcagaacctcagtcccatcattgatttctgggaattctttctacaaagaaaagactgcataagaaaattatatttatgaggacgtagcataaatgtcactttacatcaccaaaaacatgtataggaaatataatcactgtcccacctctctaagaatttgttaatctgtgttttacaaataaagtttaactgagccacaacaaagctagattgttcgtcacccatagaactcaaatcttctttcatctacactggtgtctctgagtagagaaatagaatctacaagattaaacataaatgagtctgtggttattgggagatgagtaaaaatggattttgaaaatacaatcttaattttacaagtcagctagctattaagttagtgccatgggtgctttcagtttacttgatcattctgctctttcctttattgccaactagagtgcaacttgcattcttttcttcagaaaaattaaactgtgaggcatccaaccctatgcccatcttctctctcttatgtgactcaacttatctaaattattcacctgaaatgccttcctcttataagattcaaaactcaaggctgggtgcagtggctcatgcctgtaatcccagcactttgggaggctgaggagggtggatcacttgcggtgaggtgttcacgttcagcccagccaacacggtgaaaccccatctctactaaaaattcaaaaaatattagctggtcatggtggtgggcccctgtaatttcagctacttgggaagctgaggcaggaggttagcttgaacctgggaggtagaggttgcagtgagccaagatcgtgccactgcactccagtctggacaacagagtgggactctgtcttaaaaaaaacaaacaaacaaaaaaaagagattcaaaactcaattctaatgggcactctcttctttaaacattatatatgcatatgtgtgtttatacagagtgaatatgtactcattcatatgtatattatatatatgcagcttctctcttgacagccttcttaattactggatgctgattctcgaagagaatataaggtattcaaagaatacagactaagtcaactttctgtacaatgcacagtgcttcctgtggattctcaatccgccttacaaaaaagtatagttttgaaaaactatgttaggtctcatcaattccacttttagatctacagactgagtatcccttatttgaaatgcttggggactggaagtgccttatatttcagaatttttctgatttggggatatttgcatatacaaacaagtcaagtatcccaaatctgaaaatccaacacccaatgaatactccctttgagcatcatgttggtgctcaaaaactttcagattttggaacattttggattggatttttggattatggatgctcagaggaattgaaaaagggtactcaaatacatgtgcagccctgttcacaaagcactcacaacagccaaaaggtagaaacagcccaaatgcccattaacagataaatggataaattaattgtgctgtatctatacaatgggatattattcagccttaaaaaagaataaagtactaatacatgctacgtggatgaatcttgaaaaccttgtgttaagtgaaagaaaccagacacaaaagctcatctctcgtatgattcaatttatatgaaatatccagaagtggaaatccagagagacagaacacagctaattggtagctaccagggtcccaggcagtaggaaatagggagcaactgctcaatgggtaaggggtttccttttggggtgatgaaaatgttcacaatctagatagatgagggggttgcacaacattgtgaatgtattaaatgccactgaactgctcactttaaagtaattaatgttaggttgtatgactttcatctaaattttaagaatctatgttaggctaaggcgtttttatgtaaatttccataattgaaacatcacttagactcagcatttgtttctacttcctcctcccattcatttctatatgttccagagaaactgtagagaccaaaactccacccgcgttgctaaatcccatctactgtttttagtcctcccttaattgaactctaagtgacgctgtagctgctccctccctctggagccaccctgatgttgtggcctttttgacaacacattactgctgctcccctttttcctctaactatgccttcttctctttcaggggtcttgttctcctgtctgtttcttaaatgtcagagttcactagagttctgtccacagacttattctctttttgttccaaaactctctatggatgatcatacacaccctcatggctccatctgtcatcactgtacacacatatccaaaacccataccttgtatcaccactgtccacatatatccaaaatccatatctcaaactgggattcaatcctggagctcctgtcccagatttccaactgcctagtaagcctattcccatgggccccgcaagagtaacaaattcaaaatcaaactcattatcttactccataaaatgcccacttctttctcctgtgttcttgacttcagtgaataatatcactttctagccagttgccaaaacaggacatgtgagagacatccccaactcttccattcccttctcggtgcccatgcaggtaaactcaaagttgtatagttgctgcatctgctcaggtcttcaatccacccattacctactgcctccttcaacttacctttaatgttttgttgaattaccgcaaaagtctcctcaactgttctccttctctataattctgctgtttcatcaaatttagtgtccaaatcacagtcacagtcacagcaaatgtttacatcatgaacattcttcatggcactgttctgattaaataccctgcatggtgtccagctgccctcgggtcaagtctaaatgcctcagcagaggatgaaagaccctttataatcaagccctgattagttccacaatttcatctctccccctcccccattcagccaaagacaaacagaaaaatcaaaaacaaagaaaaaacaatacttctggccaggcgcagtggctcacgcctgtaatcccagcactttgggaggccaaggtgggcggatcacctgaggttaggagtttgagactagcctggccaacatggtgaaactctatctctactaaaaattacaaaaattagccaggtgtggtggcggacgcctgtaatcccagctacttgggaggctgaggctgaggcaggagaatcgcttgaacctgggaggcagaggttgcagtgagccaagaccgcaccactgcactccagcctgggcaacagagcaagattctgtctcaaaacaaacaaacaaaaaaattaaaaaataaaataataaaaaaataaaaaacaatagttccatggagctgaattagaatcagcacccaatttatggcatgattagtttctagacaactcattttcagtacaataaatcgatctcaaatgatataatacacaaatcaatcaacaaaaatgtaacatacctatatacacttttagtaatatttttattcatctaaaaataaaattggccaggctcactggctcacgcctgtaatcccaacacttttggaggccaaggtgggaggatcacttgagcccaagagttcaagaccagcctgggcaacatggtgaaatcccatctctgcaaaagtataaaaattagccgagcatggcagcacacgcctatattcccagctacttgagaggctgaggtgggagaatcacctgagcccggaggtcgaggctgtcatgggttgtgatcacaacactgcactccagcctgggtgacagagttaaaatgtgtctcaaaaaaaaattaattaattaattaaatttaatccatgtaaaaaataaatggtaaatcttcatttgggtggattccttttctgcataagtgaaacagctgagattcccttaaacaggagcctaaataagtttgggtgaaaacaccttagtgtttccccaggaaattatcactttataagcagaagctttttttttattctgaagacagttgagctatattcaaaatcacagataatttgtgtcaaaaaatggtccttgcttatttgacttgcaaaaaaaaaatgcctcaaaaatgacaatcacagagggcaaatcttgagagaatgacagtgttcttctcttcctcctccttttcctcctcctccgcttctccagatcccctgttgcctattatattaactaaaataactttgttgaatgggatccttcttcttcaattcctaactttctaaaaagtttcctgcaggcagccaagcagggtggctcacgcctgtaatcccagcgctttgggaggccgaggcagaaagatcacttgagctcaggagttcaagaccagcccagacaacataggcagaccttgtctctgtttaaaaaaaaaaaaaaagtttcctccaggttctatgctggtacctgcaagcttccctcgaaatcctgatgtaataaaaaacttgttctcctgccagaggtatcaaacccatcgtttggccattgtacaaacttctctttccaaatctagtcttaaattcagaagaaacacgttccttttcactttgttttatgatgttctatgatctcaaacctttctcctcacaattcagcccatctagttttcccagcatctctgattttgttcatctcagtggagtgtcacgtacagttgctgtcattaggcagcattaaatacatatttttatgaaaatggctggtgttacaacattggggggaaatgtaaaggttgctgatcatctctttgatctcatgaatcacctctagagtatttgtctcctttaaacactctgctcttggccagatgtggtggctcatgcctgtaatctcaagtgctttgggcggccaaggcgggaggatgacttgaggccagacgttcaaggctgcagtgagctgagatggtgccacttgcactccagcctgggctacagagtgagacccagtctcaaaacaaacaaacaaaaaacagagtaaagggttccaaggtgtgagcaaggcaggttgcctcctgctccctggccctataatgcccttcctacctcattcccctagataagtttccaggattcaactnaggtgtgaccatttccaaaactttttccctattcccttaagtctggactaggtgcccccatgtctgcctccagccccaggggcggccctcccttacaggacctctcttactgtatttaattatctggttgtttgtctgcttctccaatggattgtgagtaccttgaaggaaataactgtgttgttcatacatattatttataaggtgtggaataaatacatgtgaaataaataaatacattttttgaatgaatgaatgaactataatctttttcctctgacaataaagtgttaaaatgagatgcagaaggcagtgtggaaaagtttgccggtttttttttttttttttttttgagacggagtctctctctgtcgcccaggctggactgcagtggcgcgatcttggcttactgcaagctccgcctcctgggttcacgccattctcccgcctcagcctcccgagtagctgggactacaggcacccgccaccacacccggctcattttttgtatttttttttttttagtagagatggggttcgccgtgttagccaggacggtctcgatctcctgacctcatgatctgcctgccttggcctcccaatgtgctgggattacaggcgtgagccaccgtgcccagcagtttgtcagtttctaaaaaaagtaagcatataattgccatacaactgagcaattctactcctaggtgtctacccaagaggaatggatgcaaatgcccatgcaaaggtttgcatgcaaatcgttataacagctttattcatagtaacctagaactggaaacaacctaaatgtccatcagctactaaatagaatatgacacagccatacgacgaaatgctatttaatcatgaaaaggagcaaaccagtgacgcttgctgaaacatggatgaaccctgaaaacattctgctaagtgaaagtgaaacacaagcgatcagttatgactgtgtgattccatttctaggaagtgtccagaaagggcaaatctatagagacagaaagcaggacggtggttgcctgcggttgggggtgggaactgactgtaaatggggatgggggatcttattggtacaataccaattatttaaaactgatttattatgatggttgcatcacttggtaaatctaccaaaaatgaatgaactgcaaatttgaatagggtgaactttatgatacataaaatgtaccttaataaagctgtttttaaaaacatgaggttcatcagttataacaaatctcccatgcagatggggatattgataatggggaggttgtacatgagtatgggcggggatcatatgggaaatatctgtaccttcctcttacttttgctgtgagcctaaaactgctctaaaaaaattaagtcttttagaaattaactaaaacaggacatcagattttagaatttaaatgcaaaaataagtgttcattgccatgataacatttgcccttttcgtaccacaagtattttggaaaatatacaaaattacttcttaggtacctacacatgtcagaaaagcagaagggctgaccaggagaaatgagagtgacgtgtattcccgagtctaaataggtcaaagaggaccaagccagaaacagatgaatggtaatataggaaactgtcatgtagttcctggttaaaaaatgaaaagtaatattatatctctattttcaatgaaaccatagttccttaattctaaaaccctgatttctttacacttcaataattctgaaatcagaagacaccttagaatctatgtatattttcattgcaacatcttctcccctaaaacctgttattaaataaattacaggtcttaaatagaatcttgaattcaagaaaaaaaaacagctaaaaaaatttctttgtaatatacttttgtgtttttaagtgaatatagaattgaaattcttgaaattacattgagcaaatttaatgaggttacccaatgactatctgaatcagccgaaactgcaaaagtctccatttctccatataaatctattgttttctcagttactccccaaaacccccagggcactggaaacagatgaggtctaaactctgagctgagctgcccattctcatgccgccttagaacagttgtctctagattctcacactacacacagactcatgaccactagagaaatctgaattatattctttaaaatagaaagtaaaagtaaaaggagattgaagaaaagttaggataaaattcactgtaaaagttctagttctatggagaaacagtcattctcaaacactgctggtggtaatgcaaaatggaactcaacagaaggaaactggataataatcagcaaaaatgcacttgcccattgacccagaaattccacttctgggatctgtcctaactataccttggagaatatgtggaatgacatgtacattgcagcattgtttgtatttacaaaggattgcaaagaatgcaaatgtctgtcatcaggtgacagttgaatacactgtggtatccacacacagtgaataactatgaaaaacgccatacaacgcgtagagcaatctctaggacatagtgagagaaaaagtaaggtgcagtactatatatttaatgtgctaattttgtgtaagaaaggaggaagagatttgactcaatatacacacttgctgtatttgcgaaaagaaacatgggaaaataaaccaaaaacaaatagaaaagggggaagaaagaggatagagaacagagatgcgaaggagactgacttggttgtaacttgttacaggtttgactttggaatcgggtacatgattgattttttaaatcaaaaacaaacacgaaaaagaaaagcaattctcgaaattaaaaacaaatagaaacaaacctaattgaatgtaaacatggtgacatagccccacacaaataatcattgctctgaaagacttaagaactttgactatacgtatttcatggcaaataggctaagtaaggactcttcgtagtgacatgttattatcatttttacatagtcttggtaggtttttttcctttcttcccctctaaaattgcacagaatctaaagctcccctccttctctccatacaatagcgtccatggcactgcaactcatctgccccttcctttcagaaaaggaaatacgaagattagcacaccaacacaatctacatcctgcaactatcacagagagctgcacgtattagcatcgggctgtgacaagcactgcaccaaaagaaagaaaaaatgtctgtgttttattttcttctagatatcagaagcaggcctggtagggagtgtgcttggaatccttttaagaaatataataatcttgagtaacatctaataagacctagcatttattgagcgctaagcatatgccagtgaggtagtactatgatcacagccttaagaggaaaattaatcccatgccaagtgccagacctagaacaccaagctagcctggtattataccatgggaaccatcatgtggtattattaaagtgacaggactcagaccaagacccagcaaccagtcaaataattctaaagacaagactgaagaaattcttcagagctaaaataggctcaggaactgaaatgggaggaggagagaatctgcagtcaacacatggcacagaaaaaaacaaccctggatttggaattaatgtctcgatgtaagccacatactctgacatccgaggcagagtacttaacctctctgagtcactgtactcacagtgaataagcagctataaccagcttctccagactaaatggaaattaacatagatgtgtgtaataatgtaaaatttgttaaagctataaagaaatccaagaatttattattattagttcctaggaaagcaggaaaaggggtgaaaagaaaacaaaagagaaggaatgacccagaaattaatgtaaaataagccttttttcttttcttttttttttttttttgagatggagtcttattcttgtcacccaggctggagcacagtggtgcaatctcatctcactgcaacctccgcctcccgggttcaagtgattcttctgcctcagacccccaagtagctggggttacaggcatgtgccgccacgcccagctaatttttgtatttttaatagagacatggtttcgccatattggccagactggtctcaaactactggcctcaagtgatctgcccgcctcagcctcccaaagtgcaaaataagctttttgactgagtgcattgtaagctgagccatccgactagctgtttctgtgtctcggctctcctctcttttctttgcatcagattaatggttataaaaacattttagtttatttggagaataataatactagtaaacttaccatattcttcatgtattatttggggtatttttactaaaatattgttgcgtttgggtttagctaacattaccctatgaatataactagatttagatccagagagacttttttcttacaaacacctagaaatagatattctacatagacaacatttggtaaatgtttttggctagaaaaaaggcccaatttcctacagaacccagagattcttggcattgattataaaaacagatggaaagaattgattacgctaatgaggatggttctgaggatactgaggctccaacagggggaagaggggagggttctgcagtaaggagatcagttactctcagtgaccctgacatatgccctgtccttaccacccagggcacactggcaagacttcctgccaccagcacctgcatctcactgtgggaaagcttctctggctgccctattccactctttcacctgtgcagaggtcctcggagatcactgctcctgggacgagctctcaaccagcaacgaatgggtcttggggtagaaatgcccccagctaggccggacgccgtggctcacacctgtaatctcggcactttgagaggccaaagcagaaggatctcttgaggctaggagttcaagaccagcctgggcaacacagtgagacatctgtcttaaaaacatacaaaaattagcaaagcacaactatgtgcacctgtggcctcaattatgcaggaagctgaggcaggaagattgcttgagcccaggagtttgaggttgtggtgagctatgatcacaccactggaggacagtgagaccccatctctaaaaaaagaaaaatacataaataaacaaatcaatatcccagttcctttttcccttagcgtgaaaactctgcggtacatgtttttcacaggctcccagggttccccagaaggatgaagctttggttacccacagtcacaccctgcttgctaaggagaactttattaacttttctaccctctctcacttccctattgcctttccgagtatctcctggatcacttctcaagtaaactgctagcacccaaatcctcttctcaagaatctgcttctgggaaacctaaaccaggatgctattccccttgcagaaaacattccctgccatgaacagcccaactgctcagcacaacaatccctccttactattccctcctaaaagtcaaccaaggatatggctctctcactatcacattacgtcatatttaggtggtgaccaagaagtggctggcatcctgttctatgctttgtaagtcacctcttctagctagccactcacaatctttcattctctccttatggagaaagagggaaagggctctgaagtaaggagatcacttggagcaaaatcatattttaagtgaaattaagttactagtgaactttcaggtagtctgacatacaaagatagtaattaccttctgaaatgtaattttaaaaaatgattaagatggaaacctcaaatttaaaagaattttgtgtgattgtcctctgccgtgtaaaatccttagcttctgctcagtctcatctctgccctattctttcggaagctttaaaaccccaaatgtgctactgttttcacatatatgggctggtctctgcaccagcatagtcaaaaaaagaaagaaaacaatacatatgaaggaaagcttttaaatgaatcagaagaaatttgataaaatctcaccattacagactaaatttcatctcttgctatctaattaatctaccatccatggttattacacgagttgggagaagaatagataaaggagcaccatttaagaaaatttaaaatcaggtgcattctctttgaatattagagatttagaagtaataggccgggcatggtggctcacgcctgtaatcccagcactttgggaggccaaggcgggcagatcacctgaggtcaggagtttgagaccagcctggcccacatggcgaaaacccgtctctactaaaaatacaaaaaattagctgggtgtggtggcgggtgcctgtagtcccagctactcgagaggctgagcaggagaatcacttgaacccgggaggcagaggtcacagtcagccgagatcgcaccattgcactccagcctgggcgacaagagcaaaactctgtcacaaaaaaaaaaaaaaaaaaaagtaatgaagacaaagttaagtcttttaaaatcacagtcagtacaacacataatcttgccttcctgcaatgtgaagttatcaaatacttcaggaactttcaaatctcttcaagctgttttcatgagtttcgtctgtactattaaaatacaccaccaccaccactaagaaaatctggttcaaaaatggcaaaagacatttctcccaagaagatatggaaatggccaataagcacatgcgaaagttgctcaaggtcactagtcattaggaaaaggcaaatcaaagccaccgtgtgatggtacctcacagccattaggatggcgactgtaaataattaattaattaagtgacaagcactgttgaggatgtagagaaaatggaacccttgtgttccagttctatggttgggaatgtaaaacagtgtagctgctatgcaaaatagcatggtagcgcctcaaaaacaattaagatagaactaccatatgatccagcaattccacctctaggtataaaaccaagggaattgaaagcagagtctcatctctattgtgaatattggcattattcacaatagccaaaaggtagaagcgacccaagtgtctgtcaacaaatatgagtcaataaacaaaatgtggtacacacatcaaggggataagattcagcttaaaaaggaagacaattctgagacctgctaccacatggatgaaccttgaagacattatgctaagtaaaataggccagtcacaaaaggataaatattgtatgattccacttataggagggaactacagtagtcaaattcgtagagacagagaggagaatggtggttgccagggactgggaggagaaggaatggagacttattatttaataggtacagagtctcagttttgcaagacgaaaagagttctggagatggatgatgctgacggttgcacagtaataagaaattaagcaatgccactcaactgtacccttaaaaatggctaagatggtaaacttcattaaaaaacatttaattttaaagctactactctgaaatcgttatttgtcagtgaagaatgaaaatgcattttccaaggtaagttttacaagattcaaggtgtgaaaatatcagtggctgacctgctgttaatgagcaccatctctttcacaggtaacagacatctattcatgcttctgttgaacagacatagaggcgaggcccagagatggtgggtggtttgcctagattgtcaaggagcctcagcatcagggtagaatcagggtagaattaaaattgggtgcgttctctttcaagggaatgtagagattctacattgtgagcccagggttatcttcccctgcagcgtgccttttccttgcatcttttttaaagacatcgtttcaaacatgtttccctaaattctgactccttacagaaatattcaatatttgtttaaactttcctctctatggtttccttttgaaatcttcttgaaacatgctctatggaagattaaacacagcagcacagtgacagatgagtctatcaattagcttgtctgtagaagaagcagctggaacctgacccttaaaagagcttgctccagacagatgataaatcttcaaataaagacttctcaggaaaatcctcaaacctaatgaaaagttcagctcatcccatgggccacttggcattctgttgcttgggaaatgtgcccacaccctcaccattaactcatgtgttaactgaactcttcctccagggtggaaaacgctgtattgacaagtacccaatgtcttctagtccattcccatcttgtagcttaaaatcatcctttacacggggtcggtaggtgtatttttggactttcttacacaggacagatcatagtcactgagaaaaaccattcctggtatctgaaaattcctagcacaattctcctgcatcctaaaatctcaatatttaggcaaacacattgcttttgtttgtatacattcctttgattttttaaatattgcttttagctgcactcaatcttctcaaagtagctttgaataatatagagatagtgttcttggtcaacatttacttgcaagaaaatagacgcatagacatttgcatcactgacttagagctacaagacctcataataaagtacaggattagaatccaggtgccatttgtcccttataccatgctgccgaaatccaccttactgctggcttgcttcaagaatgatgaaattatatacacacacatatacatatgtatgtttatacacatgcatatctatatatatgttaatatttatacacatacatatctatatatgtgtcaatacttatacatttatgcactataaatatcaattcaatatatatcaatttatttttaagttagtgtgtgtgcacttatgtactctatttcctgttaacgattttaaacgattttaggataaaagccatttttgattttagattctatgcattggcaaatcaactatcatatatgcatatataattcttacagccatcagaaatgatgttgtggatatacatgtatcaacatggaaatatgtttctatgtattacttagtgagacaatcaagtgacaacagcatcatgtatgatattattttatttttgtaaaacatagaaacaaatgcttggaaacacatacaacaaaatgtctaaactcgtgccatggtggtaggaacctttatttatttatttattttttagatggagtttcactcttgttgcccaggctagagtgcaatggcgctgtctcggctcactgcaacctctgcctcccaggttcaagcgattctcctgcctcactctcccaagtagctggaattacaggcatgcaccaccatactgggctaattttgtatatatatatatattttaatacagacagggtttctccatgttggtcaggctggtctcaaactcccgacctcaggtgatctgcctgtcttggccttccaaagtgctgggatcataggcatgagccactacacccggccaagcctgtatgatcttaattcatttatttctctctgtgtgtttgcttccatgtctgtcttctttttttatttcgcttacttctattttcaaatttttcctatgagcacatactactgtataaccttttttataatttttatttttatttttagctgttttttaagagatggggtctcaccatgttgaccaaactggtctcaaactcctggcctcaagtgatcctcccatctcagcttcccaaagtgctgggattacaggcgtgagccaccatgcctggccctattgtataatcttttaaagcatttttcagttactttaaatttccaaaaagtaaaaagttggattctatattgttgttttttttaaaaaaaaaaagaagttgtggaaacaccgacaaaagtactatgcactgtccaccagagaaaagaaggaagctgtatcccctgagtgggcatttcactgctgtgagctaagaagactgtcctctaaaatacctcagccatggcattcactctggcaatgcccaagcatatcactgccttctgagaacaagacaaaagaaaccaacatttcctggctctcggtgttccacagttaattttgaaaagtttggaaagaatttaaaggaaaataatattggcaacatgagcaattgttcccacattacaacaagaagttattgagaactgcccatcccaactacagataatgtggccataaagctatgacaggggaaccattattttagaaatacattcaaggatctgcaaaggaaaataattgttagaacacaataatacattatagacaataaataaactaaatgtccatttaaaaattcatttccacacatgtgaaattagaatgtcagaagtaacagaattcaagaaagtcctcaatcattctaacatttaggtttccaaatgttaactaagcaagcatttttacccctttgatccatgagtcattgtcttgcggtaaaccggtcacctacagctgctgaaatgtcacgttttgccctgtccagacatgtcaacattccaccttctcattctcctttctaatgcaaattctaggaacccatatgttggccaaaagttcatcaatttcacatggttagtttgaattgtcttcactgaagaaacttttttttttgagacgcagtctcgctctgtcacccaggctggagtgcagtgatgtgatctcggctaactgcaacctccgcctcccatgttcaagcaattctcttgcctcagtctcccaagtaggtgggactacaggcatatccaccacgcttggctaatttttatatttttagtagaggggggtttcaccatgttggccaggctgatcttgaactcctgaccttcagtgatctgcccacctcagccacccaaagtgctgggactacaggcgtgagccacagcacccaaccttgaagaaacatttcaaaacattggaattttgtttgggatacgctcagaggctggttcttggctaagacaataaatatagagttcaaataaattaaaagcccataattctcattttggtagaagtctgggaacacatcagtgttcaataataatgctcaatttaattagttaattcatacaactaattgataattaagtaatgtaataattaagcaattccttcaaaaaatactggtacatgctctgtacctgccaacttctaggatacagaaacacagtttaaatcagacaagtaaagaatacgtcctctgctgcttatgttgtagctgggggagaaagaatataataagctatgactaatgtattcataaattcctataaaatttttttgaatctattgtaaactcactcagacattttccaaaatgtatgctaatctatgcctactgatgaaaggttcagaagacttaatgtcactttcccagggaaaattaatctgttctttatttttcttgagctgaaaaaaaaaaaggtactctatatttactgaaacttgcagaatagctgtctcatgaaaagagaaaattttgactttcaagtaacattttctacatgggtaattctgcccaatgtaaaaagtgattagatcttcactatagagattctcataaaactgatttcaagaaatatgccttccaaagataagagcctctgaaattcacatgaagtgtgcatgcagctagagatggaacacatctcatgcagacagttacttcaatccccaaacatgcaaaactttcacaattcagaaagcaaaggagaaacacaatcacaattgtacagacatattggggcctcaaagaacattaaagtctctgtaatatatacaaaaccagatattaacctacaaacctcttcagtttgtctaaagtttttatgaaatagatagttggggccaggtgcggtggctcatgcctgtaatcccagcactttgggagactgaggcgggcaaatcatgaggtcaagagatcgagaccatcctggccaacatggtgaaaccccgtctctactaaaaatacaaaacttagctgggcgtggtggtgcacgcctgtaatcccagctactcaggaggctgaggcaggagaatcgcttgaacccgggaggcggaggttgcagtgagccgagatcgcgccactgcacttcagcctagcaacaaagtgagactccatctcaaaaaaaaaaaaaaaaaaaagagagagagagaaacagatagttggatgattcattttttctagtcaaggctcaggggcctcaagcttccttgaactggtgatgcaatggcacacatggtgtcaataaatgaaaactaaaaaacacaagtatctaataattttatacaaagaaacaatgtacaaaactaaaatacaccaaaaaagtaagcgacggtgaatctaaatgaaattccacccttcttactcacaaactctttgtccctcaattttcatattattttcccagtctccccaggctctaaaacttggaatcatgcttattttagcctcaaattttttgtgtcttatatccaagcgttcttcatacctcacccctttttatttgcgtagtgcgccctacattctcactgttggcactctagtccaggagctcatgtctgaacgcctgcattttctcaccatctcctaactggccttctggcagctccctcactctccaaaacatccaatctattgctgctaggttcatatttttcgcatgccaatttcacgagctcaccttccggctcaagaataggcagtggctccctactgcctgctggatcaaacccacattcctacactatcactacatgtctcagtcccccattcactggccctaagtcacctctaaatggagaagctatgcagcctggggaaaagagcctggctttgtcgttgggaaacctttgttttaaatcccagttctgctatttactccttatgagactttgagcaagttacttaaattccctgagcttcagtaaactcccttgaaaaatgggaataataaaatctatcttgctcggctattatgagaattcaatataatcgctaacacagtgggttggcacagctcgtttatattttcattcctttgttcccattagtccccagaatgcgcatctcccacctctacttctcaaagatcctaataatgtgttagcaaaatgagagcagctgtgcaggacctaatcggaaccttggggcctttctagcaaattcagattgctccttttcccatatctgtttttaagaatagaggtggaaatcctttcctggaaaactattttctgtcaaaatcagtccttacacatgactccatttcttgaaattcccatgggcaacgtaaatgccgaagattcttaattcttatttatatatgaaattaagaactattaattgagagcctattaactgtcagacacagagtaagttgctgaagatatacccatgatcttctcctacagaaatgatcaattatggaaaacagcaagtctgacaagcaagtactcaaaaaagaggacaagcatgatagtaagaaaagtataggccaagtgcggtggctcacatctgtaatcccagcactttgggaggccaaggcaggtggatcacttgaggtcaggagttcgagactagcctggccaaggtggtgaaaccttgtctctactaaaaatacaaaaattagcggggcatggtggcgcacacctgtaatcccagctactcaaggaggctgaggcatgagaatcgcttgatcctgggaggcagaggttgcagtgagccgagataacaccattgtactccagcctgggccatagagcaagactccgtctcaaagaaaagaaaagaaaagtataggccactcaggcagcagagagaggaagccaaatttaggtcaaaggagaaggtacgtgcctctagaagaaggctatttaagctaaaatttgacctataaggagggataagtttgatggaattggataggagaaagacttcagggcatggagacagagttttctgagcagagaaacagcatatgcgaaggcttagagagagccagcccacgtgctaacaggaattgaaagaagtgccatctttaactgggtagggctgacaagtgtgaggaaataagaaaggttaccagttaaggtgattcccacaaaccaggaagtgaacgtgtaccttcttgtaagggcaagggaaaacaaaactgtggattttaaatccaagattttaccagcttggatttctacggctgttaaacttgcatatggttttgtaggacttgtgtgccgcgtcacactaagcacatactctgtggcgtgaaaaatggcagatgagcctctggacttgacctttctcaatgaattctaggtagtatagtttgaagtagcaacgtgtggtgaaagaaaaaggtagactatgcattgggtaactgggtagcaatagcataaaacagaagagaggtgaggctggtcttcccaggcagtgtcaggcaatgacggagagagaaaagcaaagggattcaatgacaatgagatcacatgtaatttcaaaggagagttgccctaaatttcatttccagagctgttctctcagaacccgttgaaggcagaaaacagggtggtcttaattgtgtcatgtatcctggcccgagagggagtcggattggcatgctgtaagtcatgggtttaggagtccaagggacctgaatgtgaatctgtttttttccatttactcccatgtgacttgggacaattgacgcaatctctctgcatttcagtctatcccactttcaaaatgtggagacaactactacctctcagggtgattttgaggagtaaatgagagcatatatgcaaggtaccttgaatcacctaccttggcctagagtagacactaagtaacaggtggctcttcctaagatgctatggactctgctacctctcagcattaggctactgaggaagtgtagggacggggctggttgtaacccaaggtagaattagaattctgctcttaggtgcttaggcttaggtgctttgagagcgactttgttgaatctgaattcttttaagtggcaggaagtaaataaagcttcttggcttgacaggacatgcttgggtcttatttcacagttggtgtccncacagagaagaggaatatcactgctaattaagcattcattgagtagccttttttccctcacagtaaacatataattaagattcggtgtgtgtgtgggtgggtgtgtgtgtgtgtgtgtgtgtgtgtttgtggtggagaggaagagagagggagaattcccctacataccattagttttataaccattagtttgcataccattagtttaatcctatagttccctagccagatagcggcaagcttattctccattcaatgctgctaatctaactgtattcaagtacatgctttgcaacctgaatattgctttctgtgttgccatgaaagcaagccagggcaggaatgcatgagtgtatctaaggctctatccctttcctctttctagcctagtctgtcaacactgctgctccttgtggaagcatgaagttcctaatgcctaaaataggtaactcatttctcctctaagagaatcataagctgaatgagctgatgaggccaagccagcccaatctggaagcctgtgtggttcagaaggacttcctttaaattctatgaagacagggacagcagccagaacatatttgctaaataatttgattcccggagaagatgaacatcctccttctatctgagctttattacttcccacagacatgccaagctccatcagcgtccaatctttccaacagcctctggaaatgccctgaccactattaaaaggtaaatcagtaggttctctcatgttataaaagatgtagaggactatcgcttgccacaactaccccaaaacaaaggcctgaaataatatgagacaagaaagagacatttatattaaccttagttcctcttaagaaggaagctgtatttgtttaggaaaactctcttacaatagaaggcaagaccacagacccaggttgcctcaatttgggtaaaaccatacatgctagacaagatgaagaatgtattcaggaggggagaagaaaagagagaaaaaggatgccagtggaaaactgcacactctgccagtgactttttgtgaatcccttaaaactttgataaagttgttataactcaccaaatgcttggaaaaaaaaaatgtatttttatggaacccaaagaggagctttgtgccacatttttcatgaggtgaagctggagcaataagtttgggggcagagcagcagagaggagagtgcttattcccagcactggaattggatttgggtctggtttaaccaaatctttaatgaacaggtgcccagggctatgtgagcaacgaaaattgattagtggccagtgaatgtaaatttatcaactaaaaatttggcccacaaacaatatgcagtacttattttgcatttataaagttacatgatgtacagctctgttgcttgaatgacatgcatgcccacgtcatttcacaagaagaatgtcacataaaaagaactttcctggcttataagcaactcctaagtacttttcccttaattgactaaaggccctccagtgctgatcttcacagtactacaaagggactcacactctcctgagagcagcaatcaaacctcactgggtttgtggagagcattcctccttggaaacgtctcctcattcgacattcaacaacatcgtcattttcaacatgattcaggtcacgaaagatcagcacactttctaagaataactttatttccagccattttcaaaagaaaactagcctgggatgcagaccacaacagtataccgactttttaaggaataaactaggcaactatcttttcaaatgttgtctaagcacgactagtttaatgccatcacagagcacaccaggggacaagaggtgacagtcgccaatgcaaagctggcataggggttagcgattccaaaccaacccatttgataaagaaggtcgggggaaagaaggggaagaagaaagtaaaggaggagaaattgaaaaagcttctctgaattgaatcaactgacacccttgtaggtcgtgaagccgagtctccttttagtagagagancttaactatgtaaaggtgccatgttaagtgatggccacataaatcctgaaactattagaatccctcgtggaatagtaacattaataacagaacttaaaagtctcctttagcaaggatgtaaatgtcgacactcccttcctccccagccagagtagtcaaacaggatgggtttcttctccataaaacacagaagcataacctacatatctactgcaccagaaatggcttctataacttatttgtttatttactccgctccaattcccagaaatcaaaatgaactttcccatagggatcacctgatgcctttaacgtatccctcattaaaacggctgggaataggaggaagaaagcagactcaccatttgattgctataccagtacagtgacgaccccttcagtatcacccagaactttttccatttgttgcttaggaaacttcccttttcctttttcttatacagccacccttggcagtcagcatggcccagatctttacacgatatcctcctccgactcatcgtgagaaaacctgcaatgattacatgaagaggtagataatgtattaccctgatttggtaggtaaagtattatcctgatttatgtgacagagtgaaaggcaacttttaattgttaaccccccggggagctggatttttcaccaagatttatgcaaagcctatgcaaaacctatgcaaaaccaatgcaaaaaaaaaaaaaaaaagccatgtgtctgttttatttttaaacatttgtttcatgcttagaaggtataagatacggccaaagaaacagcgcagcaggagtaatatgcaagtattagtctaagaatagtattcaccaagaataagttgaaaataattaaaattgtaaggctggcgggcatatcagtgcagtaacatagctcctctcaacaataacagccgtagttatgcaatagatgttgaagggttaatgcccacctcaatacacagctacttcccgactcactgccagtttttctaagctcttttgacataccacgagggattaatccaaatgaacaacatgtcgtcatttcttaaaatcgattcaacaataaccaaaaattaatctgccgtccacctcctcttattagcattaagacagacagaaatctgatcccaaggaaggcaccccggagaaaagccacactcaacgtacacaaaatggagataaagaaacaaaagagatctaattaccttgagttttcctcctgggcttctgacgcaagggaacctgctgaaaatgcaggaaggaaagaaaagaggaaatttctgattgtgttgtaacatttgtaaagagagaaggagggaggaggtggcagtgtttatgagcaggatggaatctaaaaaaaaactctccaggcagagcttaacggggagctactagctgaggcacaaaatgtgctaattagaatcaatatacattgagctgaacctgaaaaaaaaaaaaagtcacagagcatttatcactgatgtttcctgttcccacccacaagccgctctcactactactttagttatgatagcacagtgttcacggaagttttaaaaatcaaaaaatatttccccttttgtgtttttgtgagagaaggaaaaatatatctgcttcttttgcaatttctaaataacaatgattattcagataaacctggaagataattgttacaatctcaaaatattagagtcacttgactattcagctcatagtcctgctaccacgtagggttagacctaaaccacatgaattaaatatcccagaaaatgaaattccacaacctctttcagtgagagttcagtagcaatcaaccctccttatcaggaaattcttatttacagacaaattaaagtttgttattctgtctttaaatatctctgaatatttctcacgttttatggaagataaattagttaccacctactattctgtactagctcttcaaatcagacataagacaacatatatgaaatatacattttttccacaatacattttaaacaaacatacaatcagactatcagcaaaaataaaaaatatttttaagtgctttaaaatacgtgtgtgtgtgtgtgtgtgtgtgtgtgtgtgtagagagagagaaaaaaaattttgcttaaagaagttctatttgttttttctttacaaatatctaagctgaactgatttaaatttgaaagacaaccttttccgttaacaggtagagaactcaggggaaaaaacgtgtgaaaatgaaaagcagttccaaaatttggtatgtaatcttagtacagcattttataatgttttctagaggttcctggcttatagtctacatatctaactattgatctgatagctattgtatatggttctactgtatgtttgaagaagggatatgacatagtgaaaagaggagaaggtctttaaatccagaggcctggaaccaattcctggctattataattagtagctgtggtgcccaagaaaatagcactctctgaatctgcttcttcatttataaaatgaagatattgataataattctaatcctataggtcttataaagattttacaagatttatttgtgaaaatcctctgagaactaaacaacatccctttatatgagtatgtgtaatataatattatatcgttgagataaacaaatactttatatctaataaacagaaaaaaatcataatttttataagtatgatttatgtatccttcagcaattacaacgaagctaaagtgtttaaattatatttcctgggaaatatagatcccaagaaatattgcactgacatttcatctgaccaatgttagagtaaaatttatcccccccaaaattaatcatccataaagatggcagtaattaccttaaattttaagcaaagatagacatgttataatcatggcatgttactaaaatccaggcaagttatcatgaaaaggacctagtctcagcctcacttcacaaatatctcccacactgacctgtcttgtgttctaaagttcctatcattccctcaaatcatctcctgggacctttttttgatatgccaattctctgagatcagtaaaacccaactagtacctattggcaaaatatttttgcccaaatatgtatattatttgagtggctaaattttagctgagagccaggactaaagacaaagaagagaattngtgaatgtagatgctgggtaagatttgggaaatctggggtccaggagtccctagcaagcacttgagacaaaccaagaaccaggggaatagggagaaaagggcnttgttaacagtcattcctagagtgctcaggcctccaatgaacaagatgaaattacattagttcaaacaagaagagcagccttcagatgaacaaatgagaggaaagtccctggagggcagcgatgggatcagccaaggcagagaggaagtgatgctccttccatcgctcccagctgggtaccagtgagtatcctccacccattccttgtgagcacccagtgggactggagccctccggctccaccttagggctacttccagggaaagccccaaaatgtgagctttgtctcaattctgcccaagaccaacccttggtctacaccacgttcttatgcctaggatgggatgagaacaatacctcaagcagaacaggcacccaactcaaagaaaggctttttttttgtttgtttttaagtgggggagggagcttagttattgagtcattgagtcaaccctgttctgacaataattctcttaaagcaaattattaactgttaaaactgttttccctgaccagaaacagactgcatattatagaaataacaaattcagggagtttcagtttcacctaacatacatgaatttgaaacctaaattggtttatatgagacantgaaaacaatctttgagaactttattgcatctaagatagattttactcctcacaacaggaagtggaacccgtgaactagtccgtttcaaaatgatcttgcatgtggtttttcgctaggtaagtaaaaaaaaaaaaaaagcaagcaaccagttgagcattttatgagatggtttttcaataggggaaattataacttgctatcatcataaatattcagagcctagtaagatattttctcattctattttcttccagtttgaatgttataggtaaaactaaaaaattattctaaaaatctgattttgccctaacttacttctaaagttgaggggaaatttttctttgaaaatatgtatttctttttcattgaagaagtgtatttttctttaactttttaaaagatggttcaaaaacttcatttggccacgaatcactcaaaaacacatggaaatatacaaaagacccagtagaaaatatacaaaggaaactcctttgatattgaatgttggggctaacgcccaggttacgggtaactgttatattgacttataatccatatagtagttgttaaaccttgcaggcaaaatttaccccaagatgtattaaaattcacagtaagatgctctgtcattacatcagacttcatagtgatcctaatctttagcaaaaactatacagtgatatgctggtaaaatgggctctctggttgcaggagccctaactggtggcttttgtcaa

SEQ ID NO: 15 - DNA, 66976 bp, Homo sapiens
  modified_base (2730)..(2730): n is t or c
  modified_base (3562)..(3562): n is a or c
  modified_base (5592)..(5592): n is g or a
  modified_base (7097)..(7097): n is c or t
  modified_base (7253)..(7253): n is c or t
  modified_base (7933)..(7933): n is c or t
  modified_base (9954)..(9954): n is t or c
  modified_base (25760)..(25760): n is t or c
  modified_base (28884)..(28884): n is c or t
  modified_base (36203)..(36203): n is g or a
  modified_base (36662)..(36662): n is c or t
  modified_base (37718)..(37718): n is t or g
  modified_base (41615)..(41615): n is t or c
  modified_base (43459)..(43459): n is g or a
  modified_base (44614)..(44614): n is c or g
  modified_base (44961)..(44961): n is a or g
  modified_base (45250)..(45250): n is a or g
  modified_base (45473)..(45473): n is c or t
  modified_base (46839)..(46839): n is c or g
  modified_base (46976)..(46976): n is c or t
  modified_base (46991)..(46991): n is g or a
  modified_base (47009)..(47009): n is g or t
  modified_base (47099)..(47099): n is a or g
  modified_base (47142)..(47195): region may or may not be present
  modified_base (48045)..(48045): n is g or c
  modified_base (48172)..(48172): n is a or t
  modified_base (54222)..(54222): n is a or g
  modified_base (63097)..(63097): n is g or t
  modified_base (65977)..(65977): n is g or a
agggctctacaacttcttttctgaaacagagtgtcttttacgtttgtcttcctccagttgccaaatgaatctaattttaggaagtgcagggaagtgttttaagttccaccgtcaaaattctgtttctgggccggtgcagtggctcacgccagtaatcccaacattttgggagaccgaggccagcagatcactggggcttaggagtttgagaacagcctggctaacacagaccatctttaccaaaaacacaaaaattagccaggtgtggtggctgcacctgtagttccagctactcgggaggctgaagcaggaaactggcttgagcccagaagacggaggttgcagtgagccaaaatcgcgccactgcactccatccagcctggacaacagagcaaaaccctgtctcaaaaaataaaaaatctgtttctaaaaatcgggtgggctttttaccagggctgctttatggcccggttcctccaagtccaccccactcaccgaaagagttagcggaggatgggggcggttggggtgggctcggtaggtcacgggcggtgaaaaccgtgggaacccagaaagacggccaaagcacgatgaggaccgctgccggcagcccgccccaccctgggctcctccccacacccgctcgggcagccgggagccacctacaaactccaggactcgaccccagagcgctggcctgagccgcccctgctcgcccccagtccccgcctctccctccctctaatgcccccgccctcgacaccgtcgcccccccgcccctgcctctcgctccccacgtctctcggcacccccgctcccatccgcccccccgtccccgcctctcgcccccatccgtccccatttccagcctccccctgaccccgactcaagccccccgactccgcctctcgcccctctctgcccccgcctctcactcccctctccttccccgcccgcctctcacgtggaggttgggccggacccgccccgccccacagagcccgggtcccgcccccacgtggctggcagcttcctggccctatcatttctgcgctggcttcagcggctccgccccggcgccgtgccagggggccggacactccagtcgcgcggcacaggcctgaggccgctgagggccaccccgtcccctgcccgcccgccggcctgctgggattggccgagcgccggcctccgcccgagcccgcgcgttatgtaacgcgccccgggggccccgccccctcgccctggcttatataacccgggcgcaccggctcgcgccccgccccagggccaatggaggcctgcggagtcggccccgacgaccaatcgcacggcccgggggcgggaccggtcacgcggcggcagggggcgcggcgccggctgctgaccggcacgcggcgagcctcgagactgcgcgagggcggccccgggggcgagcggctgtgcgcggggccaagggcgggggcagcaggtgagtgcgcggccgggcgggagttctgggcggccgggcgggagttctgggcactcgcgcgcggcagaggagccccgcgagccctgccctcggtactgggggcccccggagcgtggcgcttccgagccacccgcctccccgggccccatccctcggcgcgcgggaaagttggggcaggggtgaggaccgcgcggtcggggcgccccagccagccgggccgctggcgtcggactgtctgttccatttgtcccttgtcacccttgtctcctccccctaggccggagtcctgaaagtcgagcgagctccgggttttgaaaatgttggagggaaaagctcctcggagatgagcgtgaccccctggctcgtggtggccgcctgttctcactaacgccatggcggggaccggagtgagaaaccggtgtctgtcactgactgcaaagtgagcgagaagcaggctgcgggccgtcccagcacgacgtggagccccgcggagacctcgagatgccccgcggggaagctcctggccccgggagacggggggctaaggacgaggccctgggcgaagaatcgggggagcggtggagccccgagttccatctgcagaggaaattggcggacagcagccacaggtgacgcgctggcttcaggccgagggccccatgcgttcgttgtccttccctggagcagggaaagggggacctaaatctttttattcttttgttttcaagcccaggggaaagtgtaaaggggagactcgggcaatgtaggatgaagtgatccgtgacactgaagaaaattaccgaagagtatcaggagggaaaagtggttacaaaagttagctgagttggggctcaagtggattaagggaaagtaagtggagaatgtttgtcattcaccagttgctttgcctcgagttccccacctagaggaagaggggtcaccaccctgtggactgatgccggtagagcacttagaaacttacctggcttgcagtttgtgttccctaagccgcaagatgctgttgtcttcagaggatgaagttgtaatttttttttatcttccagtgaacagcaagatcgaaacagagtttctgaagaacttatcatggttgtccaagaaatgaaaaaatacttcccctcggagagacgcaataaaccaagcactctagatgccctcaactatgctctccgctgtgtccacagcgttcaaggtaaacaagccggagagaaatttcatcctacgaatgcaccaggactcanacaagcagccagaggagtggtcagtggggtctcagtcagacaaataatttgagctttttctggtgctttgtggaagatgagcaaatctacaccgattccattcgtgtcttaattgttcacatgtgaaagaccaggaaaactttatctgtataatagtgtataatacctatgcaatgttttgctcatgtgttgcaagagagtagagtttagcataagcacattttgaaggctgaccttttaaagaaatattgtcttctatggaagttatgggaaaaaaatgcattccacgaaatagttacctttacatgccgtacacatactttcaaaatgcagtaatgaggctgggcgcggtgcctcacgcctgtaatcccagcactttgggaggccgaggcgggcagatcacgaggtcaggagatcgagaccatcctggctaatacggtgaaaccccgtctctactaaaaatacaaaaaattagccgggtgtggtggcgggcgcctgtagtccagctattcgggaggctgagacaggagaacggcgtgaacccgggaggcggagcttgcagtgagccgagatcacgccactgcactcccgcctgggtgacagagcgagactctgtctctaaaaaataataatgataaaaatgcagtaatgatatatcaggaatttaccaaactaaaaatgaaccattgtaaacactttttctctctgacatttccagggatttcattaaagccatattctctttagcacaaacctcagtgcttcatatatgatatgttcctgaatgacagagtactgtttctgctccccccgcaaaaaaattgtgtatgcntctgaaatttttagttagtaccttaaatgtatcttgcttcctgtgatccagaacatgcagaattcataaaatcaaatcttaagtttgcacaactatcagtattttaggtaaaagcagaaaatgatctgtttttgagaaaaatgcactgaggtgttctcatccgaaaaaaataatccagcttgatagtgatgaaatggtttcctaaagatactgttgtcactggactacctgtttatctccctgtgtttcttagcaaacagtgagtttttccagattctcagtcagaatggagcacctcaggcagatgtgagcatgtacagtcttgaggagctggccactatcgcttcagaacacacttccaaaaacacagtaagaattcatgcattttgccatatcaacctgggtgacttttcctaagggcctgctctagatgtaggcttttaagaaggataacaacgtttcagcaaccacaatttgagagaagcaaaggaggaactgctaaagaggcatggtgtagcttctccgcccttgccagagaaaacatctaaaagcagaagcagcccgttctgtgtgctgtgcagctcagtgactttggttatgaggtgcttctagctccttagcattcccaagctctcttgaattaagagaaaacaaaaattacactgcagagtaatttcctgcaccttattctaatctccgaattgttaatttctatttatatcattcttagttccaatacctactacttcaagttgtaacaactggatgttatagaacaggtgagttgagatgctgtcatttttcctaaaattttggaagagacctttagtatatcttttttaatctctcttcttgtttgacagagtaatcttcatgtttggttgatacggtggagattacttattttaagtaacataattgttacttaaagattttgtaatagtggaacgtgcgcaatccctagtattataacagtgcttattttatggactggtgtgtacatagtactgtaggaggtgctatggagatttttaaaaatagcttaagaaaatatttgtcttttaagatatttaaaataaagctagagaggaaagtatgccaatgctagcaaacacaaactgctgattataaataagtttcatttatgtgtaatggaaaaaattagagcagtgatgcttatgtaatgaggtttgtcaaggacagcttcttgaagaaggtgaatcttcagtgtgtcttaaagcatagaatctgcgttgatgacgagaacaccgtccacccaggtgtatggcacagtttgcagagaagttatgtgccatacgtattttagtctgcatagaataagctagtatattttttggcatagaaattgaaccttcagtaggtgaagtgcaggtcttaggagaagatttaagaagcatgttggagaaaattatttgaggagttttgttgcatttgtaggttgtgcctgtgtattttaagatactggtcatgttagagatccagaagaaatttacctttcagggaatattgctagtgagtatctcaatatttgcatttattttaaatgtttttcataggatacctttgtggcagtattttcatttctgtctggaaggttagtgcacatttctgaacaggctgctttgatcctgaatcgtaagaaagatgtcctggcgtcttctcactttgttgacctgcttgcacctcaagacatgagggtattctacgcgcacactgccagagctcagcttcctttctggaacaactggacccaaagaggtaacaggaccaatgttcagatgtctatctttcctcatcaagatcagtttcattcttacaggaatagtacagaaattaacatattatttagaacatgcacactatctggtttttcttattcctgttatagaaagtcacgtgatgaaaacagcattttaaaagcttctgataacatactcaatacgtttgtttccattttgtcacatctgtttcacagatgatatgtcataaatattatttcattaccagcntattgtatagtggtttagttgctatgaaggctctgtttcctttaagttaaaattaaatgtttttcctccttcatgatttccttgtatgagaaattttactttggagataaaatttggatcattaggctgggcaaggtggctcacgcctgtaatcccagcactttgggaggttgaggcaggtggatcacctgaggtcaggagttccagaccagcctggccaacatggtaaaaccccatctgtactaaaagtacaaaaattagtcaggcatggtagtgcatgcctgtaatcccagctactcaggaggttgaggcacgagaagcacttgaacccgggagacagaggttgcagtgagccaagatcacaccattgcactccagcctgggcgacaagcgtgaaactgtttctggggaaaaaaaaaaaaaaaaattcagatcattagctctcttacagtttttcttgcccctgaaacttatgagtcttattactttgttttccttctggaatgcttttctttcataattcaaagatgcctattgcagttttctttgtgacattcagtcctgtgtgatcttaatttatttctttttagtcatccttcattattttatattctttgtgaagtgtctcttaaagagctttaaaatatatatatatatatatcagcgttctctttgattccaagcccttctctctaattaaaaaaaaaattcattgtagtaaaaaacacatacagtttactatctgatatagtttggctgtgtccccacccaaatctcatgttgaattgtaactcccacaattcccatgtgtcgtgggaggaacccagtgggagataattgcatcatgagggcgtctttcccatgctgttctcgtgatagtggataagtctcatgagatctgattgctttaaaaatgggagtttctctgcacaagctctctctctttgcctgctgccgtccatgtaagatgtaacttgcccctccttgccttctgccgtgattgtgaggcttcctcagccacgtggaactgtaagtccgttaaacctctttcttttgtaaattgcccaatcttgggtctgtctttatcagcagcatgcaaacggacctaatacaccatcttaatcatttttaggcattcactccattgctgtgaaggatgtttacattgttgtgaaacagatctccataactttttcatctttatatctgaaattctatctactatttctaattttttacccagtagttaatttaatgaagggtagctttgcgtgtttcttcttccaattatagattgccccatcttttaaaaatatttttacataagctctagaaaacatgcatgtcatccctgcttgcttctagctcatctcttttcccatctttcaaaaatactgattttatttctcatcccctttcctaaatacacattttcaacctttgtctgtatttgtttctctgcttttgttagctgttcattccgtaaacatttatttaataatcangtgggtcaagaactagtccggatacagatacagctgtgaacaggacatacacaatattgtctgccaggtctttcccattttttccccaggtatttttccttcagcactgcctgtggcttttcagccttttcatttttgctgattactgattactgngatatttcccttctgtattagtccattcttacgctgctataaagaactatctgagactgggtaattaataaaggaaagaagtttaattgactcacagttccacatgactggggaggcctcaggaaacttacaatcatggcagaaggggaagcaaacatgtctttctacacatgatggcaggaaggagaagaatgggagccgagtgaaggaggaagccctttataaagccatcagatctcttgagaacttactatcatgagaacagcatgggggaaactgcccccatgattcaattacctccctccgggttcctcccaccacacatggggattatgggaactataattcaagatgagatttgggtggggatacagccaaaccatatcattctgctcttaagccctcccaaatctcacgtcctcacatttcaaaatgcaatcatgcttttccaacagtcccccaaagtcttagctcattccagcattagaccaaaagtccaagtccaaagtctcatatgtgacaaagcaagtccctttcacctatgagcctgtaaaatccaaagcaagttagttatctcctaggtacaatagacgtacaagcattgggtaaatacacccatttcaaatgggagaaattggccaaaacaaaggggctacaggccccttgcaagtctgaaatcnactgaagcaataattaaatattaaagctccaaaataatctcctttgactccatgtctcacatccaggtcatgctggtgcaagaggtgggctcctacagccttgggcagctctgcccttgtggctttgcagggtacagcctcccttatggctggtttcatgggctggcattgagtgtctgtggcttttctgggctcacagtgcaagcttttggtggatctaccattcttaggtctggaggatggtggccctcttctcacagctccactaggcagtgccccagtgaagactgtgtgggctccgaacccaaatttcccttacacatctctcttagcagaggttctctatgagggctccgcccctgtagcaaacttctgcctggacatccaggcatttccgtacatcctctgaaatctaggcagaggtttccaaacctcagttcttgtcttctgcacacctgcaggaccaacaccatatggaagctgccaaggaatagggcttgcaccctctgaagctatggcctgagctgtaccttggtcccttttagccatggctggaggtgaagcagctggaatggagggcatcatgtcccaaggctgcacagagcagtgggggcctggacaggcccagaaaaccattttttctctcgtaggcctcagcctgtgatgggaggggttgctgtgaagtctctgacatgccctgaagacattttccccattgtcttggtgattaacatttggcttcttgttacttctgcaaatttctgtagcaggcttgaatttctccccagaaaatgggtttttcttttccattgcatcttcaggctacaaattttccaagttgttatgctctgcttcctctttaatgctttgctgtttagaaatttcttccgtcagatacctaaatcatctctctcaagttcaaagttccacagatctctaggccaggagcaaaagttgccagtctctttgcatagcagaagtgtcctttactccagtcccaacaagttcctcatctctctctgagaccacctcagcctgcacttcattgtccatatcactatcagcattttggtcaaagccattcaacaagtctctaggaagttccagactttcccacattttcttgtcttcttctaagccctccaaactgttccagtgtctgcctgttacccagttccaaagtcacttccacatttttgggtatctatggcagcaccccactctttgcagtacaagtttactgtattagtccattctcatgctgctaataaagacatacccaagactgggtaatttctaaaggaaagagttttaattgactcagttcagcatggctggggaggcctcaggaaacttaacaatcatggcagacggggacatgtccttcacgtggcaacagcaaggagaagcgccaagcaaaagggggaaaagcctcttataaaaccatgagctctcatgagaactcactatcacgagaacgggatgacggcaaccacccccatgattcagttacctcccaccaggtccctcccttgacatgtggggattatgggaactacaattcaagatgagatttgggtggggacacagccaaaccatatcaccttttatgtaaaatcttaatatgccctgaaataattcttttggatctcaaaattcacttatgccataaggcacgatataattctagtttactctttatattgtacttttgccttatgaatctcaaggattgatactgagagcagttggttaatgccaccccctttataggctatgcctgcgttacccccttcgattccttactttgagcacatagaacatcaagaggacttaggaagcaatccactcagctgttgtcaacctctggtcctgtattagaatatgtttctatttaacatgtcttgtacaaacctcttagaaggatctgaccattacttcttcagagtacgcttttagaaacaagcatcacatatttacagcctaggaatggaaatgcattgtgggtgcacgtctgctgncttagatcacgtagtctagctttcagtggtccaggacttctagtgagtgcagttggagttcatgtgtctggtgtgatgaataaatggtataagcaaactgacctcacagtagaggccgttttctgtagaagattataccaatcttcagtgctttattaatgctttctgactcttctgtgatcgtctcttagaagtatcaagacctgggctgcttattcaatattttggttgttttggattttcactgtttatgctaccttcagtgtatattttttgaacatctcacagttttccatggttcctataactgaagacttcttgtttcagtgaacaaatgcccaaaagatattcaggaagctctaatcagaggaaatacatatagtcaacaaacactgggcagaaatttcagtcccctcatctcctaaggcaaatttagacatttctgaattatcacctcataaatcaataaaatgggtgcagaaatcaatggaattgctagcaaatcattggcatgagggttgtgagaaaacattaataaaactctgaagattggtacagttttctggaggtttatccatacacaataaagtcataaaacgattctatcatttaacctaggaacacaactttttgaaatttatccaaagaaagagcttaaagaaaaaaagaaaattatatatcgtatagctaagaagctgaaaatagtctgaattcccaactttttagaaaggtccagactattacaatgggatggaatattaccaccagaataattgtgtccaaggatcattacattgacctttgagatgatgaacatgggcagtttgggaactatgaaaagtagtaaggggaagagataaagccgattctcactgttatacctgaggttcacggttccagtaccaaaaccaatactagtatttcccaattctagtattgtgactggatctcaaaatgaaggaagggggttctattttaatcaaggagacctctctctcttttaaaaaatagtttgttgtttgataatggtgcaacattgtttcactgagaaagacctggataagagggagtgactgaccaggcatctttctttctagcagctgcacggtatgaatgtgctccggtgaaaccttttttctgcaggatccggtaagtatagtggctcgtggaagccagcaacagtggattatgttctgagtttattttgcagttggtttgattcttgtgtattcagctcacttctgttgcgagatacaaaaaataagacttggttattgccacaaggagttcgtattttgattgagaagagacatactcatgagaaaactagataataatgcaataggaggctgggcacagtggctcacacctgtaatcctagcactttgagaggcagaggcggaggcgggcggatcacaaggtcaaggggtcgagaacatcctggccaacatggtgaaacggcgtttctactaaaaatacaaaaattaattagacgtggtagtgcacgcctgtagtcccagctactcgggaggctgaggcaggagaatagcttgaacctgggaggtggaggttgcagtgagctgagatggcgccattgcactccagcctggcaacagagcgagactctgtctcaaaaaaaataaaaataaataataatgcgataggaaaaaagtctagaaaaataattcttaactctaggagtgtataagaatcactagatgtgaagtacactttaaaatgaccattgttttgggctcttttttgtttagctttttgtttttcagtcacatttaaaattaatttttgaaatttttaatagctttaaagaaagcaagagatttatatttgtgagaaggatttaaaagatctagagacagtgaaccagaagaaaacagatgaaaattttaacagtagttgattgctggtaggaattactactgaattttttatcttctaaatttgctgcaatatattattagtgttccttttatgttatatacataatatataattatatattctgttatgttatatattatgtatataagatgatataataatatgttcttttgtaataagaacaaatattttgaaatgacattgtgattgccagttttagtattgaagttactaaatgctcaagatgtttagagagaagaaaaaccctcatgatgaaatagtctaatattccagtactccatggaactgggggacttgagctcataggctctggatgcttgggggggacggcctgagaaagggcacagcggtgggaggggctgtcttgttccagtgggtcattcacaagtgagttgtatgaagatcttagaacagttcctgcctcctaataagtgctgtatgtgtttctgatgttaattaatattttggggtgctttctctgagccaggcactttgtcagtgctgggattcaaacagttcttgcctcacgtaccttaaattctgtgaggaggagaccaataataaacacatattcaaatgcctgtgttggctggtgataagttgtgtgtagacagtaaagcaaggagcgggagttctgggaagcgggagattgccgttgtattcagggtgatccaggaactcttaggaagtctaattggaaacagcgaccagaaggagggcagggggtgagccacaccggtatctgaggggtggcaagtgtctgagaaagtgtgttccaggcagagggagcagcaggcgcagaggccctggggtgggccatgcctggcctgtgggaggagtgacacggagctgctgtggcctgagtggaggaaggaacgaggatggaagaagacgggaaagcacgggccacaccacagggagcagtgacttctgcacgaagtgttttatttcagtttatcacttgcttattttcaaaacgttttactttgggaattttcaaacataacacaaaagaagagaagataatgtaatgaactgctgcggtgtcatcacccagctttttaagaactcgaaccctggccagtctggcgtcatctctgccagcagcagttctttaaccccctcttcccaggttaccagacagcgtagctcagatctcgtctgatttcctgcatcagtatttcagaatgtcattctaagagaggaagttctcattcacgtttgtggggttcaaaatggtcccatctttggccagtaggaatccctttgggttggcccctgtacccttgtgagagtgccccatggtctttgacagcttccattgttttaagcatgagacaccccagacccattttagacattccttagcccagacttggcatcagccatttctctaaggatccctggttccttttggtgggaaatggcattcacatttggaggccaaatctggatggtagggatggttattgctacagggttatcattgcatctagaaattttcagtgaacagaggtaggaaacgttcatttcagtttcctttttttttttttttttgagacaggatctcactgtgtcccccaagctggagtgcagtggcacgatctcggctcactgcaatctctgcctcctgggttccaacaattctcccacctcagcctcccaagtagctgggactacaggcatgcaccgccacagctaatttttatattttttgtagagacggggtttctccatgttggccaggctggtctcgaactcctggcctcaagtgatccaacctcctcggcctcccaaagtgttgggattacaggcgtgagccaccatgcctggcccggaaacagtttccaatatgaaagactggtgttggctgcagtgttgaagatactttggagggggaagaagggaggcagggagggcagttagaggctgttacagaggtacaggctataggccagcgttccggggggaggtataaatatttgtatattctggatattttttacacttgatcttagccaaaaggccaagaagcgatattctggatatttttagagaacaaattaccagaatttattaatgggttatatttggagtgagtgtgaagtaagagtcaaggataataccaggagttttgggctggagttatcattttttgaggcagacgaaattctaggaaaatcaacttcctggaggtggagagaaagaatgtggtgcttagttttagataagttaagtttgtgatacctgttgaatatccaagttgagactctatgagagtctggagttaaggaaaacttttaggctagaggtagatatttgggtcatcagcgtgtaaatggcatttaaaacctttggactggatgagcctggaaaatgcattcgtggatgtggagggaagctggaaggtgtgagcatggatgtgagcatggatgtgggtcggcagcaccgggacacagctcacttcccggtgattctcttttcttggtgaaatgggaagcaaggtcatcagttgagggtgcagagtgggagaagattctgtagtgtgtggtagaagagaaagagcaaggtggggctgggcgcagtggctcacgcctgtaatcccagtactttgggaggccaaggtgggctgatcacctgaggtcaggagtttgagaccagcctgacgaacatggtgaaaccccatctctactaaaaatacaaaaatcatctgggcgtggtggcacgcacctgtaatcccagctactcgggaggctgaggcaggagaatcagcttgcacccaggaggtggaggttgcagtgagccaagattgtgccatcgcactccagcctgggcaacagagcgagactccgtctttaaaaaaaaaaaaaaaagaaaaaaaagtgaggtggaagtaggaacagactagagaatctctggcagtactaaagagcccctcaggattggtagtcacacctttacgtgctggcgagagagtaaatggatgattggtaaaagttggggagtgtgaattcagtcttgggctttttgacttctaggtgaagtggcatctcccagtagaagcatccgctgggcagctgcagtggtaacaccgggtgatgatatttgaagtcatcaatcagagcctcccctgccgagaggttctttgtgaggagtggaaaggggtgcgccctctgggccagggacagggcttgctgaactcggttttagcctcaactttttctttcctcctcagccagatgcctttatagatggagcacctgacctcatgcaagggccctcatcactgaagctggagacgaaattggttcttagagagtgtagaaagggacgactgagaactagccccggggcatgattgcaggggaccctgttttctctcttgtgacacctgttgtagatatgtgaaatgagacagttatgcttgtccctcttcacagcagaaggggaaaagtcaaactgggaatgcatcacatggaggccaggagaaaagtcatggaaccactaattctgtttttacactcacagtaatctaagccagttctttacacaacctcttactcgttgaataatagcgaaaatttaagctaacatattctttcttttgaaaacaaacatgtttaaacattttagatgtgggtatgtctgtcttggaaattaccaataaaatatttctcccagccttgtttcgccatgggccagtagggtgcgtcaggaccagcactaatatctttaatctcctcagtggaggtgaagacagaaagcaagagaagtgtcactccccattccggatcatcccctatctgattcatgtacatcaccctgcccagccagaattggaatcggaaccttgctgtctcactgtggttgaaaagattcactctggttatgaaggtaagtcagtagataagatgcagaaatgtcagcaatcagataggaacatgggaaagtctgtttacgtcagtcatagaacaacaaaaagagctcttgggtctccaatttgacccttaaactcttcaggcatttgaagctggttttcattgatgtctctgtttactgacttttagcttcttgtacagtcattgtcttcatggtcagcatggctgaacgaatggtctcagcacaggacttggtgacagatacggttttctagtcctctctctgctggtgacccattcagtgtggccttttgcttgtgttgtgtgaaataagagtgctgaaattgtttcccagagaggccacaagagtgattttatgtttttgaagtcttctgaaactccctgagtaaaatgtatattttatcttgtacgagcagaactatatttctaaatgcatatatcaatacataggcagcttccatgtattactgaaaagtcagttcagatgtaaaatgacatatgctttcctgcaaattaccatcctatgcaacagtcacacaataaaaaccacagggcttatgggaaaaatgggtttaggagcacaaaactcaaaagcttagttgcgtattaaaaataagacaggaatcaaataaaaatgataatcgtgccgggtgcagtggctcacgcctgtaatcccagcactttgggaggccgaggcgggtggatcatgaggttaggagttcgagaccagcctggccaacgtgatgaaaccccgtctctactaaaaattacaaaaattagctgggtgtggtggcgtgtgcctgtaatcccagctactcaggaggctgaggcaggagaactgcttgaaccgggacccgggaggcggaggttgcggtgagctgagatcacaccattgcactccagcctgggcaacaagagtaaaactctgtctcaaaaaaaaaaaaaaaaaaaagataatcatttcatgcatgttaaatgattaggaaatctacaaacactacaataaatatggctcataccacaggacggactgaggtagcaggtagatgtttgaggtgtgtatgcatgtttttgtgtattctttttttgttgttgttttgctttgctttgagacagggttttgctctgtcactcaggctggagtgcagtgtgtggtcatggctcattgcagcctcagactcctgggcttcagtgatcctcccaccgcagcctccagggtagttaggaccacaggcacgcaccatcacgcctgactaattttatttatttatttattttttgtagagacagggtcacactatgttgcccaggctgttctcgaactcctgggctctagtgatcctcctgccttggcctcctaaagtgctgggattatagatgtgagccatcagacctgtttttgtgtatttgtaagtggttcctttgaactggatgctgttttctgcattcacttaaggcttcttgaaaatgaaatagcgcacaagcaaatgagatattagcatttgctcataccattccctaatatatcaatcacttcatttttttttttcttgagtctcgctctgttacccaggctggagtgcagtgggcacgatctcagctcactgcaacctccacctcctgggttcaagcaattctcatgcttcagcctcccgagtacctgggattacaggcgcccaccaccccaccctgctaatttttgtatttttagtagagacagggttttatcatgttggccaagctcgtctcaaattcctgacctcaagtgatcggcctcccaaagtgctgggattacacgcgtgagccaccgagcccggcgacacttcatttttaaagcaagcattagaatagaactgaccataccaattttattacacaaagaatatccatatggtactaaataacatttgtagtattttcgtttgtttagttatatgcagctactaaatctgattaaactttttagttactccagttttaactattaaatgatttatgatgagccaggtgtggtggcaggcgcctgtaatcccagctacttgggaggctgaggcatgagaatctcttgaacctgggaggtggaggttgcaatgagccgagatcatgccactgcactccaacctgggggatagagcaagactctgtctccaaaaaaaaaaaaaaagagagaaaactatttaatgtgcacattctttctctctctgtttaaaattgactttaataggcttcaaatttttacctaattaaaatgtagttagtaatgaaattactatcatttaactgtagctttggctgcttgaaggccaggcccctaaatgagatttctaccatttcatatagattttgttctctttttaatatgttaagtggttagttaggtggataattaattagatatttgcctttaaatgggtctttgtttttttttccttagctcctcggatcccagtgaataaaagaatcttcaccaccacacacaccccagggtgtgtttttcttgaagtagatgaaaagtaagtacttctttaagcctaaaagaaatttgtttctgaaaataaatataaatgtgaagaagattacattatgtttgcatgtttatacattatgtaattgaaatctgtccatttgcctatttgatttttgttacatggaaatgtatgttgtctaaatttttaatataaatattttgcatattataaagtgattacaagttgtatttgatttctaaacagtatgctttaggtaggccaagaattatttcattttacagagaagacaatgaacccaccggccagtttgctgagaacagatgtatagtatctgattgcgctcaaactgggaccaagactctggtcttctagcacttattctggtgttatttacacttgccaagtgcttctcaaatcagtttatgatgaaatttcagttagtctgaagtgggggcgaaggtggggagaacagattattttttgtaaagaattgttctttattttgaacttctgtccttcctacttttgggggatgttgaaatagtctttgttatttaaaggatagtgatagtaggtagtagttattgcttaatgctgttttttagtatctttatttggaaaaagtaaatatcagtatcactacatcagtatcccgcattttttccccacatttattttaacattttacttactcatgaaattcaaaaatctgggaaccaacacaccacaccacacataactgaaaagcaaaaatgtcagaaacattttcttgataattttttattaaaaaaatttaacatctgaaaatcagtgtatttgataatgtctaccctgaaaccaaatagtaatgtgtgagatacttaacctgtataaagtaagaaaattcagctaaatataattctaaaaatagcttaaatctcttgtattagaaaatatttgtgggtttttacacagggaaaatatttacggaatccagttttttctgaagcatccttagtcttaccatcgtaagtttcccatgaacctttatcctgaaactatttctgtgtactagctgtctgtctatctgatattaccttttgggtgacattgtgttttttttgttttgtttttgagatggagtctcacactgttgcccgggctggagtgcagtggtgcggtcttggctcactgcaacctccacctccctggttcaagcaattcacctgcctcagcctcccaaataactgagattacaggcacacaccaccacacccggctaatttttttatattttcagtagagatggggtttcaccatgttggccagactggtctcgaactcctgacctcaggcagtctgcccgcctcagcctcccaaagtgctgggattacaggcgtgagccaccgtgcctggcctaggtgacattgtttttatgtaattttaattatgctgtatgaattagcaacctgcattattcatttaacatcatcagcatctttctacgttacgatgtgctttttgtagactttttaaatggcaacataaacataattatggagggcatcagagtcctctaaggaacttgctaaaagacagatgcctggtcttatttccagagcttctgatttagtaagcatacagcgagactgtggatctgtattttagcaagttcgctagatgattttgatgtaatgtgtcagatgaccaacatgtgttagattatacagccatttcccccaggatgggcacttgggttctttgctgtttttataaatgctaagataaacagctttgcataaaattgtctcacatttagaatgaaatacagaagtatttttaaaagtgtataagaattacctgatgagtatgccacctgtgttgtgtatctgtatcccagagcagtgcctttgctgggttacctacctcaggacctgattggaacatcgatcctaagctacctgcaccctgaagatcgttctctgatggttgccatacaccaaaaaggtcaggacctactcctttataggaggaaatatttttctctcattgatttgttctaatttttcttttcatctcattagagcgcaacctttaaccagagaggcattacattgaagctgctaaagcaattgttttctatttaaacatactaaaacaggccaggcacagtgggtcacacctgtaatcccagcactttgggaggccgaggtgggcgaattgcctgaggtcaggagttggagaccagcctggccaacatggtgtaacccatctatactaaaagtacaaaaattagccaggcatggtggtgcacgcctgtaatctcagctactcaggaggctgaggcacaagaactgcttgaacctgggaggcggaagttgcagtgagccaatatcatgccactgcactccagcctaggcaacagagcgagactcaatctcaaaaaaaaccactaaaacatttacaaataaatggcttaaaaaggacatttgtaatcagtatctgtgttaagtaaatcctatttttgtcttattattttatatagttttgaagtatgcagggcatcctccctttgaacattctcccattcgattttgtactcaaaacggagactacatcatactggattccagttggtccagctttgtgaatccctggagccggaagatttctttcatcattggtcggcataaagttcgaacgtaagccagtcagttttcatattttctaaaacatctcttgtatcaaataatattccttagcttattgactgccctctgactcaattgacacataaactaaataaagcacagatttgttttcggtgctttggggagacagtttgacagtgtgtaccgtgagccttaaaagaagtcataatatcagccttaaagtagcttaaatatccatcattaagtaaactctggaatatttgcttgatgtattattatattggtcaatgaaaatttttgcagagatcacataacatggaaaaatatttgatttttaaatataaaaatcagcatacaaaattatttatacctatgattataattatgtttaaaacgaacatactatgaaataaggaaaagagaattgaaaggaaataaaatatgaattttggttaagtgtaggtactaggacctacaagtgtttctttctttctttttttttttttttaaagatctctttagtgagcatgtaaaactttttatatcagccttccgccatcaaattccacttgtttgtgtctttttttttttttttctttgagacaggttctccctctgttgcccaggctggagtgcagtgatgcgatcacagctcagtgcagccttaacctcccctggctcaggtgatcctcccacttcagcctcccaagtagctgggcccacaggtgcctgccaacacattcagccctttcttgtattttttgtagagatggggttttgccatgttgcccaggctggtctcaaactcctgtactcaagcatcctcctgcctcagcctcccagagtgctggaattttgaaggtacgagccactgcgcccggactgtgtccattttttaatacttcttttcctgccagcacagctgacaccagcttgtttgcttgctgttgcccatccacgtaacagcatcatgtggaatggaacgagaccagcccggcccacaacttcttgtaggctacagtacccctacccctaggcccttgaatctttagtcctttttttttttttgagacaggatctcagtctgtcacccaggctggagtacagtggcctgatcgcggctcactgcaacttccgcctcctgggttcaaacgtttctcctgcctcagcctctccagtagctgggattacaggtgcacgccaccacacccagctcatttttgtatttttaatagagacaggtttcaccatgttggccaggctggtctcgaactcctgacctcaaatgatccacccaccttggcctcccaaagtgctgggcttacaggtgtgagccatcacgcccaaccctgtggtccatttttaattgaactctaggccttttgacctggctctaggtttccctctgatgtctatcttttttaagcatggaaattttacttgactccagtatcatgctgagatcgagaagttatgttttttggtatcttgttatacagcattgtctacatgaacatgaacctgagaacagtagatctaccagtaagacgtatttgatcacctgttaatattacagtagagatgatgccgagccatggtgagaagaggtctcaaggttgctcttacctctttctactccagggtttggcccctccgcagagcacgtgtagaacttaatggaagaaatgggctcctggccgccctaactcatgagactgatttgtgctagaaaacgaatttgattattaagaaatacagctgccaagtaattaccattggtattgctcagaaaggactttgtcccttctccccaccccataccccccaagtacggaaacctattgggaaatgaacatgaaatccgatggttgcttggcatgaacgtaggaaactgcagccagtaagatgccttcatgaggcttccatctggggctcgttgatggtctgtgttccccagccccagtcagggttaaagatacggcctggatttctgaagctctcttttcagttctttgatgaaatatatgtgaaattatgcaacatataatgaatattcagaatgttttcagtattttaaaaaattacactggtatttacatcttaacaacaaagattatgtgagggaaaggatttaaggtctagtaggtattaatcttgctcataaaatattaattattcattatatttataaagtataaagctctgtgtaagacagtgtgctgggccttgagaatgtaatggtaatcaaaacattctctttaccatcaggaaacccacactgtaatgggagagacagtaaataaaaatggcactgtcatatataactagagtttggtaagtgtgacagttgaaatgggaagggggctgcaagactgtttagcaagggaccctgcctgtatctctctcagtccttcccagcagcactgcaggcaagcaggtcaggtgtcctcagctctcattttacaggtaaaatccatactcagtaaactagagtagccttcccagggatcacttcgggaggagtgaaagtggagactgcagccaagttttctctcttactcctacttcacttcacatacacagcaaagcaataaatacttcatggcatttttgttgctgtttcatgaaggctgtctccttattgcctgcagattaatcagttctgcattacatagttactgacttaaaatacattttagtgtcttacgcttataatcccagcactttgggaggctgaggcaggaggatcacttgaggccaggagttcaagactggcctgggcaagatagtgagaccccttctctacaaaaaatttaaaaacaaaaattagttgggcatggtggtacgtgcctgtagtcccagctacttaggaggctgaggcaagagggttgcttgagtccaggtgttcaaggcagtagtgagccagaattgcaccactgcactccaggctgggcagcagagcaagaccctgtctcttaaaaaaaaaaaaaaaaaatatatatatatatatatatatattacatacacacacacacatacatacacaatttagttttgtagaaattttcacaactaggaatatgtaaatctcataaagcaatctgttctatttccatttcactcaaaaaacaaattccaaatacctctgaaaggttttcaagctcacaatgtgtttatattaggaaccaggtgtacttttattcccagatcaatcaaccatgtatttgttcctttagcaaatatgtagtgggtgcctgctatggaccagacactgttctaggtactgaagatccaggagtgaacaaagtagacaaaatacctcaccccgtggcacttacctggcagtgggatatagggagagacagttacataaaacgtatagtgtgtcaagttgtgaaataaggttatatattcaggtactgcttgccacagacatatggtgtacctgacgccatgcagatagatattgatctagatacagtctagatgctaaagtagagaaaggcgattggtgcagctgttccactgtgatggaaatgtgcagggtgagtgaatagtccctagacgtggagatattcctgactgcttttacgatactgtcagcatcctatgattgtcttgataatttctgcctttgggaaactgtttcagtttttaggtaactgagctgcatgtatcagttgagaaacggcaggctggcataatggaaaaaggacagcccaggcttgggggtcagacgtaggcggattcaaatcctaactgctgcttctcggttatgtgaacttgggccagttcctcagagtacctcatcccctgactttgtgtatcggggataattcctactttctgggttgttgtgagaactccgtgagctgatgcagctgattcagtatgcctcacgaatgggacttgctttaccaaggtacccacaggcagtacagtgtggtggcacacagggtggactctggagcccagactctggtcccttcgtgaacacctgcttcccccttacctgccaggccacctggaaaaggtatttaatcaggtgaaggagaaaatacgtgtaaagcacttggaataataaggattttcaaaatgtcaggtattcttctatgttataaaaactagtacaggctgggtgcagtggcacactcctgtaatgccagcactttgggaggccgaagcgggtggatcatttgaggtcaggagttcaagaccagcctggccaacatggcgaaaccccgtctctactaaaaatacaaaaattagccaggcgtggtggcgtgcacctgtaatcccagctactcgggaggctgaggcaggaggatcgcctgaacctgggtggcaaagattgcagtgaaccaagattatgctactgcactccagcctgggtgacagagcaagactctgtctcaaaaaaaaaaaaaaaaaaaaaaaaaaactagtatagtacagtgcctgtcacatagaaggtcccaagtaaacatcagttccttcccttctttgtaatcctctctgttggcatgtgtgccattcactgtattcaggtcatagattgaagatgctctaaaatttgagtataaataagaccgaaggtattgtaatagctacattttcaccactagggtgggttgcagaactgtcttaattagatagcttaagtgttaggtgcaataaacattaaatgttgtttggaaaacttggggtctttaaaattcttagagtaagttacagttactcagttactgtcaaattttgaaaccagttatttgctgaagatattttagtagctaaggaggttacttgtccctgatttcagatttgtacatatatagcactgaaaccantacagaaagatgagtgctttagagaaacttaaggggcctgttaatgtctcatttgtttcttattattttctgtaccttcatgaatagaattctagcctcatattttttctttggagtcaaagaattgttttgtaaaagcatagatctattcttggaatagtctattaaaaatcactttcgacttcatttaaattgtttgactcagtctctcactgggcattttctaggagcccactaaatgaggatgtttttgctaccaaaattaaaaagatgaacgataatgacaaagacataacagaattacaagaacaaatttacaaacttctcttacaggtaaggtgagattgttaaaaatgcaaagttccctgaattgtgttttgttttaatgctcagtaaattcacttcacaaaaataaactgtaaagggagacaaatctttgccctctacattccagaaatttttgtctttctcttttcgtttttaaattaaattttattctttgttccttattctgtgttacacagaatatttttgtaagaacccattgtaagacagcaaaccacgtgactgagagaattattacattccaaaggcaccagcgtgctcagcctttgggttttggcttcaggatttttaaaataatttcagttttaaagatgggaggagagggatggtaggtctcagtttctcttaactattgtaaggtaaaagtgggaaaatgtatgtgttgaaataactaaaggtgttttctacaagagattcaatgaataagtggtaaatagaactaatggtgtcgtgtagagtaactgtcctcggtggttttcagaatgtctcccataaaatctctagggtgcatgaaatacctgccacgttcttggaaaaagtataatatatagttagtttgttctctgtattctaaactgggcataaagaactagagtttattttcctgttttaaaaaattaattatactatggctttttaacaatatgttgtcctggaaatacctacctagactagaacataagaccttgctcttgaaaattgccgaaatgacagaggagtgcctttcgtgtcagcatcagcattaaaagtaccaacctgcacacacctaatttagtatttcaggaattgtcatcttaatttttacatgattctagatgagctctgcggtggctgcatttgaacagccagcaattctggacttgttcctctttgtccttccagccagttcacgtgagcgtgtccagcggctacgggagcctggggagcagcgggtcgcaggagcagcttgtcagcatcgcctcctccagtgaggccagtgggcaccgtgtggaggagacgaaggcggagcaggtgcatgggcttatgtcacattcttatacaggcatcgtgttttctgtactacctcggttctgaatgtggtgacatcttagtatatattcctgacttgaagacctcaactgataacagatattttcatccattttggtttggaaaaaaaagtctgtaaaaagaaaatatcacctttggaaagtgatatttgaattaattgtatgcgttctaaaaattagcatattgtgaacagatttatttagaatttgttggtaccagtatactgtggcatggtgcaggaaactggattaaagtgattactgtgcttcagtcattatatcttcaaagaaacagaagctaagtgtattttgtttatgtatcttttagtggacatttttataatttttgaaacatattttatcattcctttccctaagatgaccttgcagcaggtctatgccagtgtgaacaaaattaaaaatctgggtcagcagctctacattgagtcaatgaccaaatcatcattcaagccagtgacggggacacgcacagaaccgaatggtggtggtgagtcagcgaatggtggtggtgagtcagccggcagccccaaggatctccttccatgggctgtcactctctgcatagacgtcatgtatgtgattcgtgagcataaagtcatgaccctgtgttgctgcttttcatatttcttgatttgcctagatagcaatagtaatagcaatagtagtaataataatggcagcaacaaatactgttctgaaaggaaatggtattagaatgtatttgtaacagttgcagttcacttttactgaagaattaacttctctgtaaataccaacgaattatagatttccctccctacatgggcatctctttaaacaaaaagagtggattttagaatgcattttaaataataaagtatattaaaatgaaaatccctttctgtcatttcaaacagaaaatctttgtgacctaaattcagtgaaaaactttggctcttttcttgacatgtatttacttttctcaaatacaaggtaaggagcactcaaaaagagctggatcagtagtaaaactggcatcatattgaaaagttaacctagttgcattgtatggcataggggatgttcaataatatagaaatcaaattagattgacatttaaatttagctaactttcccttcatttttcttcctgaatgttaatataacttggaagttgtgatggatcttggtcactaaatgttattaacctctatcattgtcaaatgtagacgttttacacagtggggtgaaatttttgaggtcaataatgataacagctatatgcttcaggacttgacatgatttacaccacagaaagtcaaactgctgctcccagaggtgacatcactgggaactttcttagtttgtactgctgtaacaaaatacctgtgactagataatggataaagaacagaaacctatttcttacagttttggaggcgaggaagtccaagatcagggcaccggcaggttcagtgtctagcgagggccaggtctgtgcttctcagagaacatcacttccttgaaggggacaaacgctgtgtcctcacatggcacaagggacagaaaggcagaaagagacttagctagttccttctagcccttttgaaaggttgcaaatcccattcatgagaacagagtcctcatgactttgtcacttcctaaaggccgtggctgttcactgtcacattgagttttaagttgcaacataggagtcatgggggacacanacattcaaaccatagtagagcccattggactccccagacagagcaagtcctgttctttcattttttttcttttcacctcgataggaagttgagcattccattggtttcttctgctgttacatgtaagggcacaagataggaatcacagctgctttttttattgtcccttgaaacccctacatttctcctctgcaaaagaatttatcttaaatacaatttttactatatagattattattccatgtcctagcagagagaattcttttaggaggtttttaaagctaaagtgtctaaatgtttttctcattgtctggtcctgctagtcctgctcacagctgcctgggcctaggatctcatggtagtatcacagtttcacacactgacctctgtcctcatctcagtatagcttcccttctcacttgctgcattattcagtttcttatcatcgaccatggatcttgtaatgccatcggtactatttttttttgaaggctatatctttaagtagatggcaatattccatcattcactttttataaaattgaagctgcaggtggccgggtgcagtggctcatgcctgtaatcccagcactttgggagcccgaggtgggcagatcacgaggtcaggagatcgagaccatcctggctaacatggtgaaaccccgtctctactaaaaatacaaaaattagccgggcgtggtggtgggcgcctctagtcccagctacctgggaggctgaggcaggagaatggcgtgaatccgggaggtggagcttgcagtgagccgagatcgcgccactgcactccagcctgggcaacagagcaagactccgtctcaaaaaaaaaaaaaaaaaaaaaaaaattgaagctgcaggtaactccgtgtgcttatgcagctactttagaaactgaaatgttcccactccttagatagattcttacatttggctctaatagcacacacaggatgtgactttggagaagaaggaagatctcttgccatttggcacagctttggagaaccaatgtttctgggagatcttgattttattaacatttggagacctacaagtttaaagagctacagaaacctttatactctttgcttgagagacatgaggatgcaacttaaaaatgttataatttaaatgttagaaattgactagagatgtataccaatgaaaaggaaaatgcttagttaagcatgatcattgtttacatgtgttataggaacttaagtttaaaatttatatttatctttcttacaacctaagagcaaataatgctttaaagagagattttaaaagttagtatgagttaatatgggagggcaaggaataacagggatatgtaaagccccttcagctacatgtacagaggccaactacaagagacatcattgaggaaatctgggaaaagtaagtgtccatgtctagggtgatggaatgtctgagtgagagaagaggacccttaagttgaacaggttcagagtgagattgcttccagtttctgctcagggatgtagagagccagaaacagcatcaccccagacttaacaacagaaaaatctagatgaaaggcaagttcaagacctttcttgacttcagagtgctgaggttacagagcagccagcaggcctaaaatctaaggagagaaacatatttgcagggaggagcaagatgcagcactggattccagtgcaccgacagcctgagtcaagtaacttgcaaaagacagaccctctcgaaggcacaatgccaaggaaagaccaaaagctgaaagtggagcagatactgagaaaaaacaaaaaaattacccaccaaaccagccaccagctgaggcaagaagtataactagaggaatttgaaagctgttgtacatgctgtagaaccattacaatactcaaacctggcctaaaaaatagattaattcagaggtctaaaagaaggaaaggcatgcccagtctctgtgtcctacacaagttacacagttctcaacaagaaattatgtagcatatgatgggcaagaagggaaaaaagaaacctcccaagagacaaaaccatcatcagaacaagactcagagaggacacagaagttggaactatctgacagggaaagtaaaataattatgaatgatgtattaaaggctagtggacaaagtgggcaccatgcaggaccgggtgggtaatcacagcgtagagatgggcatgaaagaaaccctcaaatggaaatgtaacatctgtaacatcaatgccagagatgaggaacgcatttgatagcactcaacacagcctggaaaagaatcattattcaagctgaaacagagaaagaagaatgaagcaaacagaatagagcattctaagaatttggagacagcctcaaactgtccaacataggtgtaattggaatctcagaagaaatagttgaagaaataacagtcaggaattttctactgagccaaagaccatcaagtaagttaaatacagaacaaaaacaaaacaaaacacttgggcatatcatattcaaactgatggaaaaaagaaaatcttgaaagcagagaaaaaagacagattacatacagagaaacaaagacaagaattgtaacagacatttcttcagaaaccatgcacactaaaaagacaatagagtagcatcctcaaccagaaaaactgtcagcacagaattctatacctagtgaaaacgatatgtaagaaaataaaggtgatataaagattttctcaaaaatcatgggaatttatttccagcacacttactccacaagaaatgctaaaggaatttcttagaaagagtatgataccagaccaaaaacttggatctacacaaagaagtgaaaagcactggaaagggaataaatgaagataaaataaattctattttttaatttttaaaattaatcataaagataatggactaaagcaaaaccagcaaactggatttatagcatatataaaagtaatctttgtgacaacaatactacagagggtgggaggaagttattgggaatatactattagttccttatactgtatttgaaacagtattttattatttggaggtagacactgagtactcaagaatatatattggaaactttaggaaaacaattcgaaaatattttttaagtataaataataagttaatagaggaggtaaaatggaatttaagacacttaacccaaaatggtggtcagaaaccaaatggactgaagccgggagtggtgttatgtgccagctactaagaacactgaggtgagaggatcacttgagcccaggagttcgagtccagcctgggcaacgtagccatacttcatctctaaaaatacacttaaatagcaaatggaacaaacagaaaacagctagtggctggcatattttaatccagcaacatcagcaatcactaatgtactgaatatatgaatcatattcaatccagttattcatattcaatattaataatctccgtacactaatttacaagactgaaatcgtcaaattggatgaaaagatccagctacatactatctacaagaacccattgtgaaaataaacataggttaaaagcaaaagagtagaaaagatataccatgctaacacagaagaaagcgggaagctgtattattacacaaagtaaacttcagaacaaggaatgttagtagagttagaaagagagactgtgtaacagataaaggagttgattccttaggaacatagaacagtcttacatgtttatgtatctaatatcagagctgtttattctctagccataatggattaaactagaaatcagtaacagaggtatccagaaaatcctcaaatgttcagaaattaaataacttcatacttacaaataatccacaggtcagagaggaagtttcaagggaaataaaaacattttgggccgggcgcagtggctcacgcctgtaatcccagcactttagggggccgaggtgggcagatcacaagataaggagatcgagaccatcctggctaacacggtgaaactctgtctcgactaaaaatacaaaaaaaaaaaaaattagccaggcatagtggcacacacctgcagtcccagctactcaggaggctgaggcaggagaattgcgtgaacccaggaggtggaacttgcagtgagccaagatcccaccactgcactccagcctgggcgacagagcggactccgtctcaaaaaaaaaaaaaaaaaaaaaaaaaattgaattgaacaaaatgaaaagagaacataaaatatgtgggatatacctaaaacactgcttaaagggaaatttacagcactgagtgtttatatggaaaaaagaagaatggtctcgactcagtaatctaagcttcctccttaaaaataagagaaaaaagaacaaattgtttcacaagtaagcaataagaaggaaataataaagaccagatatcaatggaattgaagagaaactaagttaaatcaaagggtaataaaattaataagtctttagccatactgaacaaaagaaaagaaaggaaggacaggttggactttatcaaaatttaaaacttctcctttttgaaagagactgataactatggccataccaccctgaacgtacccaatcttatctgaaaggcactgataagacaaatgaaaagacaaaatagttgcaaatgatatatacaataatgaagttatatccagtgtacataaagaacgctcaaaactcaagaagacaacccaattagaaacatttttccaaagaagatacataaacagtaaatagcatatgaaaagatgctgaacctaagtcattagacaaaaaaaatgtaaaccatatgagataacaccacacatctgtgagaatggctaagtttttttaaaaaactgacaagtgttgacaaggacacagagtgaccagagcactcacctattgttggaggtaatgccaaattgtacagccactttgggaaagtttgacatttcccataaagttagacatactcttaccatgtaacttagcaattctattcctagtgatttacccaactgaaatagaaacttaagttcacgcaaaaacctgtacatgaatatttattacactgttactctccaaacacagaaacaacccaaatgtcattcagcaggagaatggataagctatgtgtatccacacagtgaaatgctacttaacggtgaagagaaatgaacttgattcacagaccattgtatatataaatcttaaatacatttcattaagtgaaagaaggcagaaccaaaaggttacatattgtacaattccattctggaaaagcgttctttctggaatgctctagctctggaaaacagatcagtatttactatgattgggtagagaaggaggtgactacagagggacagctgtaaggacatttttaagtcatggaaatgttcttttggttactgtggtgatggatacacaactttccgtgcatttgccaaaacccacagatttgtgcactccatctcaccccaaaatgcagagagaacccaagatgagatgcaggcattgacaactgagtccaactgcattacagatgacaggcctaaacacacggaaggggtggggaagaacggagctcagtagctttggaaaacagtgcttcaactgtatctcctagggctaaatacaaaattatgaatgtgcacaaacactgtacgcaagttggtgtattcgtttcccaccagagtatgggttagcaattctaaagcgactttatactagggttgaacaaattgtggaagccgctatagataacgatgaccagactcctcactatcaggaaagccacacaaagcagaagggaaggaactccatggtgctggattggcgcgaacagtttcagtgtggactcatgccccttttgtttaatatacagagggatggatagacacgggttagtatattataccaaataaagaataaaacagatggttcaggcaaagattatcaaggaatgaaatagaggtgaaaggttaatggagaacttaaactttgagaagtttaaaagaaacagaatacttgcgtgatctcaaagtattcctccaaaacatattatttattacattgtaaaatagtaactttacacaggacaaacaaacctgagagacaccatgttaaccaatgaacaaggtaacaaaacatactgacatcatgtaccctgggatgatgcacaaggaaggacactgcacctccgccgcattctctccccaaatgcataacctcaatctaatcatgagaagacatcagagaaactcaaatcgaaggccatcccactaaagttctgaccctgaacggaaaacaacattgagtggtaaactgataaaatccaaagaaggtctgttttccagttagtagaatggtaccactgttcatttcctagttggggtcattttattatggttgtagaccatggtaacattagtggaagctgggtgatgggcatataggaactctattgtactatttttgcaactcttcaagtctaaaattatttcaaaattaaaagttaaaaatcattaatgagtgaaaggtaatacagtcatttttccataatatgctctgaaaatagagaagcctcttccaagccagctaaaaatgaccagcatctaacacttctacaaaacttctcagtagtacatgacataattagttactccttccttaagaaagttttcattcttggtcgctgtgaggccaaaccttgcaggattttctgttatctttccagctaccctttttcagtctcctttattggctcattgtcctttataggaagtttttagtgcttaagcctggaggttttttcttctctctaaactactacatctacaatggtggccacttgccacatgtggcaatttaaattcaaattcaatacaattaaatgtaatacaattaacatttagtttctcagttgctttagccatattccaagtgtttaatagttacgttagcacatataatactagtcagcacaaataatccatcagtcatcacagaaagttctgttggacacaggctccacctgggagatgctgtgtacttcacacagcatcacgtaagatgcacaggtcttcccacattccacccttagtgattgccagggttgatcagttgtacaggaagcgtcagcttaacattggaaagctccccatcaaccttaaacctatggtttcattccttgataatctttgttggaaatttttgtttcattccttatttttctaaatacaatcgtagccattctatgtgtaatgtgctctgcaccttattttattcattacntgttgtggatatctttctattagtgcattttagatctgcactcatttttaatagccgcatgatattctgttgatatatacatgataaagtgccatgatttaattttggtaagaaagtatatgttcttaattacatgctgggtacttttaattgcacatccctttattctgtttcaggtgaatgtaagacctttacttccttccaccaaacactgaaaaacaatagtgtgtacactgagccctgtgaggatttgaggaacgatgagcacagcccatcctatcaacagatcaactgtatcgacagtgtcatcaggtatgagaccgcaagtttggataccatgtaagtctgttccggaagcatacactgccactgtagagacttcatagaatttttaatagctgctctgacttggtttttcactataaatcagtagacgtttatggcgtgcctaacacatangctgaacatttcagaaggcacaaaaagctagaagatgcattccttctttgaaggaactgtggtatagttcagaagacaagacctaattttgtcaaaattaaatggtgtaaggcaagcttctccaacccatggcccacaggctgcatgtggcacaggacagctttgagtgcagcccaacacaagtatgtaaactttcttaaaacgttatgagatttttttgtgtgatttttttttttttttagttcgtcagttatgattagtattagtgtattttatgtgtggcctaagacaattattcttcttccagtgtggcccagggaagccaaaagattggacacccatggtataagatttgaaggttaattcaagaccacagtaaaagaaatgttacaatccagtgattgaggctgggatggtcagggaagactttatcaaagaagaaagtacaaagtatgccaaacataagtggcatgagaaaagcaaagaggtgggaaatggcacaattagggaacaggtaagaatgtgtggcctaattatgttgttacagatacctgaagagctacaacattccagctttgaaaagaaagtgtatctcctgtacaaatacaacttcttcctcctcagaagaagacaaacagaaccacaaggcagatgatgtccaagccttacaaggtaacaagaatgcccctcagagttaaattcaaagaactgtaaatacatccttcttgtttctctttaatgtcttatattgttataagcataaaattctggtttcatattacctctttatgacagtaaggtttaatttctcagttacaaacttctgtaaactgggtcttttatgtaaatttctcgttgggaatttttcttttcactgtcagtttctcttacaccaccagctggtttgcaaatcccagccatacctaaatcagaaatgccaacaaatggacggtccatagacacaggaggaggagctccacagatcctgtccacggcgatgctgagcttggggtcgggcataagccaatgcggttacagcagcaccattgtccatgncccacccccagagacaggtaccacactcgcctcttactttgaaaatatactcaactttaactacattgtgatgagaaaacaaaagtcatgaataccattcgctcggttgtaacttctaaactacacatattttttcctttctttagttcagttaaagtatttctggaaacattatcatgtttatgttggttacatattttggacagtatttctcagttatgttatttgtcaatgaaatcagttgacacatataaagcacttaatacagtacctagtaggtaggtattagccctcaattagtgttagccattattaatgcaattattgatggcactgtgttaggttacttccttgctgactttcacagaatgtgttcctttcacctgcatttcaccatcctgtattgtgatgagctcagtcacacataccttcagatttttgtattgctgtgatggcaatgaatagagtactttaaaactcttcatttaataccataatttcttggtaaattattctactgtcttcttattcctctttattgccacttgtccttttgacattttcatcactcataacaatttgggtagatgaaggaatggtgacaaatacgttaaattgggttttcacatgatctctgctttatctttgctagtcttcagtggcttatcagctaatacgtgttaagccatttctgtgtgccactgtctgctcttagttcttcactggtatgatctcattaaatctttccaacaacctgtgagatggagagtgtggtactgacaggagatctgtggattggtggagaaagatcagagagcattacgtttctaattagtcaaaagtagagtttcactggaactgagctagcccctccacagaggagcatatgcacattttttagtgtgccttttaatattttgcattcctgtgtgggcatgtagctgttcataatacagcccatacaggaagggagggtatcacccaatatgaaaagctcttttttttatattctgccactctgctttctatactctgctcttatatgaccgtttttaatgaatttatactaaagtctatatgctttaggaaatttttactgctattagtttcttctgatcttaaatcagcctcaacatttacagggccacatctttattccatggagaaaaagcagaatcagagcccagatattccttaaaacatatctctatgtcttttgctttctgaaaagctcatattcattagctcagtttgcatcctgactcagatgagttgtgtctaaggacgatggtcacaaatgcatttccttgcaagttaatgtcttcattttatgtgtggaacaattaaaccacaaattaggcacagtaacttcacttgcccaatatgacacagcccatgagtagtagagtagggaatcaagtattgaccattagtctctaggagtcgttgccattacagatactttgaacctaaagcagggtctaattaagatggaatgtaggccaggcacagtggctcatgcctataaccccagcattttgggaggccaagacaggaggattgtttgaatgcaggagtttgagaccagcttgggcaacatggtgagactctgtctacaaaaaatttaaaaaaaaatttttttttttttttgagaaggagtcttgctctgtcacccaggctggtgtgcagtggtgcgatctcagctcactacagcctccacctcccggattcaagcgattctcctgcttcagcctcccaaatagctgggattacaggccccgccaccatgcccagctaatttttgtatttttagtagagatgatatcaccatgttggccaggctggtctcgaactccggacctcaggtgatccgcccaccttggcctcccaaagtgctgggattacaggcgtgagccacagcgtccagccctaaaataattttttaaaagatggaatatgagatacaatgactaagccaatcaataaaatgcaaatttaaaataaactcaatcccaaagaagagcaggaaaggaggaatagattaacaaaaaagaagcagagagaacaaaccaaataagataatagctctgcatgcagctatgtcaataatgacataaaattgactcaacacttcaattaaaaggcaaaaattgggccaagcatagtggttcacaactgtaaccccagggactcaggaggccaaggaggtaagattgcttgaggccaggagtttgagaccagcctgggcaatacagtgaaaccccatctctacaaaaaatgtttaaattagccaagtgtggtgacccacacctgtagtcccagctacttgggaggctgagacaggaggatcaattgagcctagcttgagctcatcttgggttcgttgctacagtgagttctgatcacattactgtactccagctgagggacagagcaagaccctgtctctaaaaataagtaaatacatgaaaggcaaaaattctcaaaacagatttttaaaaatcaagacctaactatatgcaaagtacaagtgaaattcacaaatggattgaaagtaaatgaatggaaaaagatgcacaagtgaaaccgtaagcatcagaaggctgcagtgccttattaatatatgtaaaatagattccaggacatcttttcataatgacaaggtggtcaattcatcaggaagacataacagtcataaatgtatattcattaataacagctttgaaagctatgaagcagccgggcgtggtggttcacgcctgtaatcccagcactttgggaggccaaggcgggcggatcacctgaggtcaggagtttgagaccagcctgaccaacacggagaaaccccatctttactaaaaatacaaaattagctgggcatggtgatgcatgcctgtaatcccagctactcaggaggctgaggcaggagaatcgcttgaacctgggaggtggaggttgcagtgagccaagattgcgccattgcactccacacttcagcctgggcaacaagagcaaaactccatctcaaaaaaaaaaaagctatgaagcaaaaataaggaaatagactttccataattatatttggaaaattgtacactccctctctgcaactgataaaaacatagagaaaaaataagaaacagatgatccatacaacactatcagccaccttgatctaattgacacttagagaacgtgagacccagtaactgtataatccacaaccttttcaagtacacacagtatgttcactgagaaatacgacatgttgggctgtactatgtctcagatttaaaaaggattgatggtgtgtgaactgtgttctctggctagtgaattaaattaaaaatcagtaataagatatttcaacccaaatgtttataaatcagacaacacatttctaaatctatgattcaaaaaagaaatcacaaagagaattagaaaacatttccaaatcgatactgaaagtatagcatactaaaatgtatgggatacagctaaaaacggggcttgtaagaagataaatagctttaaaaatgccgttagagaagaaatgtctcaaatcaatgatctaaagttacagttttaaaaagtcagcaaaagaagtgaaataagtccaagatagaatgaaggaaataataaagacaaaagcaaaaatcgacaaaatagaaaacagacaatagagaaaattaaagctaaaagttggttttttgaaaagatgaacaaaattgataaactccttataccagtacagagtggtcttggttcatgtagctgtacagtaagtcttgaaatcaggtagtttaaatccttcagctttattctttttcaagattgctttgactgttaggtcttttgtctatataaactgtagactcagtttctcggtgccttttntccttattatggggttgtattttcctgcttctttgcatgcctggtgattctttctaattggatgccagatactgtgaatgggtaccaaatatatttgtattcctataaatattcttgatctttattctgggtcccagtgaagttacctgtaaacagattgatcctttcaggctttgctttttaaatttgctaggcaggacaaatagtgtgtagtctaggcctgtttttcctctgctacaaaggcgagaccttcctgagtgctccttgtgatgcctcaggagttaggagagtctctagtctggcggatgggaaccggcactattccgcagcttgcgtgagcttcagctcttgttcctgctaatcctctcaggtggttttttcctcccatgaatgccctggtgagtccttggaagccctccaggctgcacgctggggcagtcctcgggctcacctcccttgtttcttatcctcgggggtcactttccttcagtgtctgaaacctattattttatatattttggcttttttttttttaatctcaggaaggtaagtttggtccctgttactacaacttggccagaagcaaagccccctgtggtgctcatttagtcacaggccacttctggatgcagagtgggccaaacctacccaaaccacccggatgctgcaccacaggggcgagctggaatggatattgggggagccctctacagtgtccaccacaaaatcttttgttgttagaagtaatttttttagaagcaaccccaaaatagatacaactattctatatcaataaaagaaattttaatgtacaactattatatatcaataatagataaaaaagaggcaacccaaaatccatccacaggtgttcactttagtaaactgtgctatgcatataaaatggaactccgcagcagtgtagaagtatgagacaactgtctagccactgataaagttctccaagggatatggtaaagtgaaaaaggtgtgttgatggttaatgtacgtatgtgcctttgggtaaagatggggtcagagaggaagataatctatattcatcctcgttcatatgtaataaactggaagggccaggtacggtggctcatgcctataatcccagcgctttgggagtccaaggcagatggatcacctgaggtcaagagtttgagaccagcctggccaacacggtgaaaccctgtctctactaaaaatacaaaattagcccagtgtggtggcacatgcctgtaattccagctacttgggaggctgaagcaggagaatcacttgaactcaggaagcagaggttgcagtgagccaagatcacgccattgcactctagcctgggcaacaagagcgaaactccatctcaaaaaaaaaaaaaatgaacaaatacaaaatttagccaggcgtggtgtggcacacgcttatagtcccagctacttgggaggctaaggcagaatcgcttgaacctgggaggcggaggttgcagtgagccatgacggcgccacttcactccagcggaatggtcttctgcaggggaaacaaatgagaactagacagagcgtggacgggggtgaggggaatttactacatgtctttattaatacttcctgatttttgaaccacatgaatatattacctatttaaaaggtaagttcaaagataaaaagaaattttgaagaattcagggagagagaaaaatgtttacaataaaagcaagatttaaataaatgtgtgcatattgattatcacaactgtaaaatgtatgtgcatttgtgcaaagaatataaaggaagacagaaaatgaagaatttctgtgctaggctaatgaagatttttcntattccagcagttataataatgtttgtaaaaatgtatcaaaaggcagttaacaaagtaaaataaatacaaataattgataggaattaaaattaaatatgtcttcttccacctcagccagggatgctaccctcttctgtgagccctggaccctgaacatgcagccagcccctttgacctcggaagaatttaaacacgtggggctcacagcggctgttctgtcagcgcacacccagaaggaagagcagaattatgttgataaattccgagaaaagatcctgtcatcaccctacagctcctatcttcagcaagaaagcaggagcaaagctaaatattcatattttcaaggtacgtaattttttaaaaataaatgccattaatctatgtaaatgttacaaactgtatctaaggactaggagataaggagtgaacaataggagttttacttgtaagaaactgatggagagatgctgaaacaatctatttacatcaacagtttatgtaagttctttgttagatcctagatctgagaaacttttttgtgagaaactgatcgagagatgctgaaataagtttatttgatagcaactatttttatccggaattttgttcatctttttagagccactttttgtcattctggtagtattggcaaatgctcattcgtcagctacttataactacctgtaagtggcatccttctcttctttttgggtttaattttccataatttgcctctacctttatccttccaggagattctacttccaagcagacgcggtcggccggctgcaggaaagggaagcacaagcggaagaagctgccggagccgccagacagcagcagctcgaacaccggctctggtccccgcaggggagcgcatcagaacgcacagccctgctgcccctccgcggcctcctctccgcacacctcgagcccgaccttcccacctgccgccatggtgcccagccaggccccttacctcgtcccagcttttcccctcccagccgcgacctcacccggaagagaatacgcagcccccggaactgcaccggaaggcctgcatgggctgcccttgtccgagggcttgcagccttacccagctttcccttttccttacttggatacttttatgaccgttttcctgcctgaccccnctgtctgtcctctgttgtcgccatcgtttttgccatgtccattcctgggggcgacagcctcttctgcgatatcaccctcaatgtcgtcagcaatgagtccaactctggacccacccccttcagtcaccagccaaaggagagaggaggaaaagtgggaggcacaaagcgaggggcacccgttcattacttcgagaagcagctcacccttgcagttaaacttacttcaggaagagatgcccagaccctctgaatctccagatcagatgagaaggaacacgtgcccacaaactgagtatgtaagtgatgctcattttcaacactcaagtgagaaagtgaatatcttactnaagttaaggtggttgcgttgggactcagtgctgacattctcagtaggtaatccgcgtggctactgtgagtgagcctgttagcctaattctgtgtaaacatgaaacacatctgcctggctctgtttggaaagtagacatgaaagaatcatctatgttctagtttcttatatactttgtgaggttttttccaaagtgctatcttttaagttttcatgtgaactggattccctctactctttaaaattcgttacaggtattacgcttaagtgttcattgcctataacacgtntttgtttacttacaaccggggttatggtcaggtgagataggaataagccatattgacaatttaacgattgtacttcttcatgcacagtcacaggacaacaggtgtgtatgaagaggtaggagctattttatttgttatcagtagagtaggcagtttatagtttcacacttaaacatgtcatttttttcaaaaccaaaagcttttttggtctgcttcctttaanttttcatccctttacctaaaaagccattctcaggtttatttagcaggttaaactttggaatctgacgttcctatatttaggtatagaatccaaggcaagtgtgaatatttacacagatttttctttgaccttctctttaaggtacaatacccttctttaacagatattcaaaatctagtgatacaaatcaagaaaatatgctcacttttgaaagcctggtgtgcttgctgaaaatctaagggaaggcagtatattacagtgagtaaagcctgggctatggattaagacacggattcaaatcccagctcggtcactagttaggaagattcacttagacaagttatttaacctttctttgcctgtgtttccttattaggaaaatggaaagatgaatccctcatagcttactctgagggctaaatgatgtatttatatagtacttctccctatgcagtaggtgctcctggagagctggaactttgttttgttcattattatattcctagtgtttgacacagtgcctagaacatataaatgttcgatatgtgtttgctgagtgacaaaaaaaaactacttgtggggtgcctggcatgtagcaggtactgagaaagtagtagtgccttaatattacttacaaaggaacttatttcttagagataggctggaacgtttttacttcttagttatatatgtaaattttattctgtttaacacacgaagttgaagatctgccagttacagtagtctcccttacccaggggatatgtttcaaacccatggtggatgccggaaaccgtgggtagttctgaaccgtatatacagtatgttttttcctaaacatactatacatatctatggtaaagtttaattgataaattaagaacagtaagagattaacagcagtaactaataacatagaacaatgataacaatatactcatcacaatttcatggatagaagattcgtttttgcctaaaattgtagcactctcagcatatgggtttttcctttccttcttgagaacttccaccttttcacttaaatgcagcactttatgacttctctttggcatatcccaattgctggcatcactcctcttgcactttggggccattattaagtaaaataaatgttacttgaacacaagcactatgataccacagtagatctgataaccaagacggctactgagtgtggaggtgtgaaataaagggatgattcctatcacaggctggaagcaataagacagctcaaaattttatgacactaccagaatggctgacaattttaaacttatgaactgtttatttctggaattttccatttactatttttggaccttggttgaccacaggtaactgaaantacagaaagcaaaaccatgaataaaggaggactactgtattttgtgataagaagattaaagtgtcttttcatgtgcccttactttctagcagtgtgttacaggcaacaatggcagtgagagcagtcctgctactacnggtgcactgtccacngggtcacctcccaggganaatccatcccatcctactgccagcgctctgtccacaggatcgcctcccatgaagaatccatcccatcctactgccagcgctctgtccacnggatcgcctcccatgaagaatccatcccatcctactgccagcgctctgtccacaggatcgcctcccatgaagaatccatcccatcttactgccagcacactgtccatgggattgcctcccagcaggactccatcccatcctactgccactgttctgtccacggggtcacctcccagcgaatccccatccagaactggttcagcagcatcaggtagtggatcaggacaactaatgtttcaaactccaatgccagacattcactatgtgctgagctctcactgtgtgccccaggcactgatgtggaagtacaaggtttttttttctttttccctttttcctttttgtcaggtatattggggtatatttatacacaataaaattcaccagtttgaggggtacaaacaagaattctgacagatgtgtaccttagtgtaagcgctaccacaatcaccatatagaacatttctgtcaccccaaacagttctgtgaccctcaccagtccatctctgccctgacccttggtctcctggcagccactggtttgctttctgtcactttagttttgcttttcctatgatttatgtatagaatcagacagtatgctgtctttcgtattcggattctttcagttagcatgatgctgttgagatgcacgctcaatagcatttatagcttagatctgtgatccattttgagttttgtgtatggtatgaggaagggtcaatatactttctttacattgggatatctaactgttcctgccgtttgttcaaaggattaatctttcccccgttaaattgccgtgatgcctttgttgaaaataacttgaccatacacgtgtgggtgtatttctggactctcttttctgttccactgatctgtatggctagctttaggccaataccacactcttaagtaatgtaactttcaagtaagtcttgaagcntggtgaagtaagtccttcaacttaattcttcttttcaaaatgattttgaatattctaggtcctttgtccatataaattatagactccatttctcagtttctacaaaaaagtctcgtggtgtttggantgaaattgtgttgaatctatagatgatcaatacgtgaataattatcttcctgatgatattgagtgttttgatccacaagtacgatttttctatgtaggtctttaattcttctcagcagggttttatagttttcagcctacaacccttacatatattttgctaaatttatctctaaggattttataattgttgatgctactgaaaatggcattttaaattttcaatttgcaattgtttgttgttagcatatagaaatttaatcaaattgtgtatttttaacttgtattttgcagtcttgctaaactcattgattagttttagtagctctttttagattctgcaggacttttctacatagtctttattatctgcaaatataattttacttctttttttccgtctgtatgtctttatttatttgtcttgcctcattgaactggctaggacccacagtgaagtgtttaatagaaataggaaaatagacacttgcctggttcacagtcttaaggggaaagcagtcagtgtttcaccattaagtacgatgttaagtataagttttccttgaatgcccttatcagattgaggaagttcacttctattgctgctccactgagttgccctttctgcgtctgttgagataatcatgtggttttcctcccttattctattaatatggtgaattacatcagttttctgataataaattaaccttgcatttggtcatgctcttttatccttttttatatgttgttggattatcttcctaatattttgttacgcattattgcatctctgtgcagaatattggtccatttactttctttacttgtaatgtctttgtctggttttggtatcagagtaattctggcctcaaaaaatgagctaggaactattctttgctattctgttttctggaagagtttgtgttgaactgatattattttttctttgtaagtttggtagactttaccagtgaatctttctgggcctggagttttcttggtgaggaggattttaacaacaaatttaaatattttaatatatatgggtctaatcaggttatcagtttcttagtgatctttggtaatttgtatctttcaagaaatgtatctattttatctaatttgttgaatatattggcataaagtttttaatattcccttttccttttaatgtctgtaggttttatagtaatgtacccctcttattgctggtattaatatttttcctgatcaatctgactgtatgtttatcaattttaataacttttcaaagaactttggatctcattggggttttttttcctattgttttttggttttttattttattgatttatgctctttttttttttttttttttttccctgggacagagtctggcactgtcacctgggctggagtgcagtggcacgatattggcttactgcaacctccacctcccaggatcaagcgattctcctgccttagcctcccgagtagctgggattacgggtgcccgccaccacacccagttgattttttgtatttttagtagagacggggtttcaccatgttggccaggctggtcttgaactcctgatctcatgattcgcccgccttggccttccaaattgctgggattacaagcatcatccaccgtgtccagcctatgctctaatttttattacttcttttctctttactttggattttattttttttttcttatttcttaaggtagaagcttacttgttagatctttgaattgagatttttcccccccaatataaacatttaatgctattgaatgctctaaccattgcatccctcaaattttttttttttttttttggaaccaaggtctcactctgttgcccaggctggagtgcagtggcatgatcccagctcactgcaccctcaaacttctgggttcaacaatcctctggcctcagcttcctgagtagctggaactgcaggcatatgccagtgtacctggccagtctaaaatatttctaatttcacttgtattttcttctttgatcttttggttgttttagaaaggcttaatttcctaatatttggagattttttttagatatttttattttatttctaatttaaatgcagtcagagaacattcttttgtattttttaaatttaccaagacattgtgtaatgatctggaatttggtccatcatgataaatgtttcatgtgcatttgaaaagaatatgctttctgctgttgttgagtcatgtgttctgtaaatgtaaattagatcaagttggttgataatgttgatccaaccttttctaactgattttctatctgttttataagttattatgatatggtttatatgtccagctataaatgtgaatttctctattttttcttatagtgcagtgagtttttgcttcatgtattttgaagctcttttattaggtgcatatacacttgagattattatatcctcttgatgaattgctctctttatcctgaaatatgtcttgctttgaagtctgctttgtctgatatcagtgtatccagtccagctttatttggttagtgtttacatggtaaatttttttcatctttttactttcaacttatctgtgtctttatatttaaagtaagtttctcgtaaccaccatatagttgggtattgctttttattcatgtgacagtctcagccttttaactgcaatgcttgcttagattatttacatttaatgtgaatattgatatggttaggtttaagttaaatctttcatcttgctactaattttctgtttgtctcatctgccctttctttttttcctcctaccctcctcctttcgggttaattgtgtattggcttctaagcataactttttttttgtttttgctctaggattaactttttatttatttttattttatcttatttttttctttgagactgagtctcactctgtcacccaggctggagtgcagtggtgccatcttggctcactgcaccctccacctcctaggttcaagcaattctcctgcctctacctcccaagtagctggtactacaggcgtgcaccaccacgcctaattttttgtatttttagtatagacggagtttcaccatgtcagccagactgaactcaaactcctgacctcaggcgatccgcccgccttggcctcccaaagtgctggcattacaggtgtgagccaccacgcccagcctgctctaggttgtacaatgcacatcttttacttatcacagtttaccttcaaatattatgcctattgtatcactttatatattagaaccttaagacggagtacttccatgtcccctttgtcttttgtgctatttttgtcatacattttaacgtgtaaaaaaacccacaataacattgttattatttttgctttaaacagtaacaacctcttaaagttgttttgtgtgagtgttttgttgttgttgttgttgttttgacacaaggtgtcactctgttacccaggctagagtgcactgatgcaatcatagctcactgtagcctcaaactcctgggctcaagcaatcctccaaccttagcctcctgagtagctaggactacaggcatgtaccaccacactcagctaattttttatttttatggagatggaacctacctcactgtgttgcccaggctggtttcaaactcctggcctcaagcagtcctctcatcttggcctcccaaagtgccaggattacaggtgtgagccaccacgcccaacctaaagatattttttaatgaggaaaatttttttattacttttttatttacatacttagttttttaaaaaaaattaaacaaatagttttgttttgtgtttttaattccttcaaagtcagtgagaaggttctagaagggtcaaatgcaagataggaaaggaatgatccataaggcttcatatcagccataaagggatggtccttgggatgaacagtttctgtgttgtggcaggaggaaggtgaggagggggtacatatatcattaattgtgtatgtttggtatcataaaggtgattaatttgctttctgatggcttcttttttccttaaaaaataggtgagattgaggcaggaaatagagaggttgaaaatagtcattgctgggggtaggttagtgcatgaccagagaactgtagcaggattcccaggtattttgatggtgcatttgaggttggtgatgatgcgtttattgtagaaacactgtaccctgttatatgtgactttctgtatgtatttggcgacttgggtttaggtaagaacaaagtcaataattggctttattggagttggcattttgacagttatgaaaagtcagagggaaaaagaagtctaaggtattgcaaggtgtgttactgaatgatgaactgaggactccactacaggaagactaagacgttattaacacatttatagttgaaataattgaacaagcccatgagagagtgaagctgagatgttgatgattttggagatggagcggttatgggtgatgataaaggacaatgtgtgtagccttgagagtgatagctcattaggaatggaaaaagagatctcaggaagaccaaagaaccaggaggctgtccacagggaggaggaagtttcccggaaatgatggttgggctggctgaggaggaggactgtccgaggcaagagtctgaagaatgagagccagtttggcaaatcagtcggacaggtcttttctaattatgtgttgttgatttttgacaggaagcagcgacagcagtatataccttactagtagtgtttattcttctaaaatctcccaaaatgggcagcaatctcaggacgtacagaaaaaagaaacatttcctaatgtcgccgaagagcccatctggagaatgatacggcagacacctgagcgcattctcatgacataccaggtacctgagaggtaagaaagcactttagaaaacccactttttatatttttgtggtttctttttttcttttttttcttttttgagacggagtctcgccctgtcacccaggctggagtgcagtggcacgatctcagcacactgcaacctccatctcctgggttcaagcgattcttctgcctcagcctcccgagtagctggaattatagatgtgcaccaccatgcgtgtctaatttttgtatttttagtagagacggggtttgtttgtgacagagtctcactctgtcgcccaggctggagtgccgtggtgccatctcggctcactacaacctccacctcccaggttcaagattctcctgcctcagcctcccaagtagttgggattacaggtatgcaccaccacaccaagctagttttttgtatttttagtagagatggaatttcctcatgttggccaggttgatcttgaactcctggcctcaggtgatctgcccacctcggcctcccaaagtgctgggattacaggcgtgagccactgcacccggcctatggtttcttaatgtgtttttaaagacaaaataattattgaatgttttataaattccctttgagaaatgtgtcttcaaatttattcatttgaagtcaagtgatgaatgatttcttaaaataagggtggcagtggtaatgttacctctattcagatccagactaaacagatcttacacatcatgagacaaagaaacaaagtctgtgctttccaagatggcacacaagtacaagaactttttgttttagactcttgatttttttgccccttctaaaaagagctaagggaaatctctttcttccatacacctcattaaaacatcatatagatattttccaccaagaaaaaagcctttaccaacttgaaaaggaaatgatctagttatttttttaatgtatgcctcatgtgttagaaaatgtaaggtgtattaccaaccaagaagaagtgctattcctagatgacgggaaaagaaccctgtgtcttattcaggactattaagattctgtttgtttgttttcagggttaaagaagttgtactaaaagaagacctggaaaagctagaaagtatgaggcagcagcagccccagttttctcntgggcaaaaggaggagctggctaaggtgtataattggattcaaagccagactgtcactcaagaaatcgacattcaagtaagcacagtaataatggctgtcatatactcatgtattttggccaggtagtgcttttaatataggtcgtgttcttgcatgatcccactaaaaactttaatcctcacagtttacctctatggtaggtgttattattccctctttaccaataagcaacaagcaggttatacacatgtgaaataattaatacaaggccatgcagttcattgggttttgaatacaggtctttttgcctccaggtggttttttcttctaccagttggaatgttagggtacgataaagagtaaaaacacctgctttgatgtgtgattgactgcatttgataggtcatttgttatgtatttcaaatatgtctgcattgtttgaaaagagttaaaaaaagatgtaagattcacaccagaggtagtattcatactaagcagaaactttaatgggacttaagtgtctttttgctgttatgagttcttctcaatgagattatttgtgaatagcctgaacagtaaagctttgatttaccaatggtcccaaccagtgttggtggcagctgtggtaatggtagtgatggttgtactagtagtgagatctttattcccgcaagtatcaagatatgggaggttgaagagtcaagttaataacaagtaggcctagtccagtggctcacgtctgtaatcccagcactttgggaggccaaggtgagaggatcaggagttggagaccacgctgggcagcatagccaaacctcatctctaataaaaatcaaaacaattagccaggtgtggtggcgtgcacctatagtcccaactactcaggaggttgaggcaggaggattgcttgagcctgggaaattgaggctacagtgagctatgatctcgccagtgcattccagccagtctcaaaaaagacaaataattcgtgtgtgtgtgtgtgtaaaaatatttttaaaaaagagagtaaagttaggtgttaaagtatgatattaaggcttatgaagtaagcaagacaatgaaatcctactaccccctctttttaaaaactaacatttttattgtggtataatacacataacatggaatttaccttctgaactatttttaagtatataattcaagaatattaaatattttcacattatgcaaccatcaccaccatccatctccagaactctcttcattttgcaaaactgaaactctgtacccatttaacaataacttccccattcctccttctcccaaccctttgcaaccactggtctactttctcttttttctttttttttgagacaaagttttgctctcttgcccacgctggagtgcagtggtgtgatcttggctcactgcaacctctgcctcccaggttcaagtgattctcctgcctcagcctccagagtaggtgggattgcaggcgcacaccaccatgcccagctaatttttgtagaaatggggtttccccatgttggccaggctggtctcaaactcctgacctcaagtaatctgcccgcctcagcctctcaaagtgctgggattacaggcaagagccatatgaatttgactactctgcacacctcatatgagtggaatcatacattatttgtcttggtgtgactgacttacagacgtacctactctcttggttactatctgcatgtagtaactttttacatcctttcactttcaacctatctgtatctagatctaaagtgagtaggcagcatatatctgaatagtgcctttcaaaatcggttcagtcaatctctgtcttttgattggagaatttagcccatttacatttaaagtaattactggtaaagaaggacttacttgtggcattttgctatttgttttctatgtgccataaagatttttttttccctcatttgctgcattactgtcatcttttgtgtttagttggttttttgaagtgaaatgtaatgccctgctcatttcctgttgtgtatattgtgtagctattttcattgcgataaccatggggattacgtttagcattctaacatatcactccagtgtgtaatttataccagcttaactttgataacctacaaaaactcgcttctgtagagctccatctccatcttctttcagttactgaagttatgaaattaggtttttatacgttgtgtttccaaaaacataattatttttatgcattaatctattaaataatatagaaagcaaaatatgagattacaaatcaaagttaaaataatactggattttatagactactagttttctttgaatgtattagtttcttaaatcatgtagaaaacaaaaagtggaattgcacattgtcgttgcaatcataatatttaccttcgctgagatctctatttcttcacacagcttcaggttactgtcagtgtcctttcatttcaaccctgcaggactcctgttagcatttcttggatggtaggtctagtggtatcaaactccctggcttttgtttgtctgggaatgtcttcacttctcccttacttttggccaaaggatttcttagttgacagttttttttctttaagcactttgaatacactgggacactgccctctggcctccacagtttctgatgagatatctgctgataatcttatcgagaatctcctgcatgtgtgagttgcttctcccttgctgcttttaagattatctttgtctttgactgcacggtatttaattatagtgtggatctccgagttctgagtacatcctagttggagttcatttagcctcttggacttttacattcatgtttttcatcaaacttggggagttttcagccattattttttcgaataatctttctgcctctttctctttttcttcctctggggcccctgtagtgcttatgttggtccactcgatggtttcccacatgtcctccaggccctgttgacttttcttcagtcttttttctttctgttcgtcggacttgacagtttcaattgtccggtcttcatacgtgtattctttcttctgcctgcttagatcggcttttgaatccctctagtgaatttttcatttcagttttgtactttttatttatggaatttctttctggcttctttttaggtttactatctctttattgatatttacattgtttgtacattgttttcttgattttgctccatgtctttctttaattctttcatcatctttttcttttttctatttttttttttagacaaggtctcactctgtcacccaggctggagtgcagtggcatgatcatggctcactgcagcctcagtctcctgggctcaagcaatcctcccacctcagcctcccgagtagctagcacacaccaccatgcccagctaattttttaattttcgtagagatggagttttgccactttgcccaggctggtcttgaactcttgagctcaagcagtccacctgcctcagccacccaaagtgctaggattataggtatgagccaccgcacccagctttttctttttctttcttttttttaagacagtctcactttgtcatccaggctggagtgcagtggtatgatcacagttcactgcagcctctacctcctggtcccaagtgatcctctcaagtagctgggactgcaagtgtgtaccaccatgcctggctaatttttttttttttcccagagatggagcctcactctgttgcccagtctggtcttgaactcctgggctcaagccatccacctgcctcagccttccaaagtgctgggattacaggcgtgagccactgtgccctaccagttctttgatcatctttcagttgttttaaaatctttgtctcgcaattctttcatctggtctttctcagagacttttgctattggtttatttttccctttgaatggcctataccaagggtgtccaatcttttggcttccctgggccacattgtaagaagaagaattgtcttgggccacacataaagtatactaacactaacaatagttaatgagctaaaaaataataaatcactaaaaaaaactcaaaatgttttaagaaagtttatgaatttgtgttgggccacattcaaagccatcctgggccgcatgtggcccatgggcaggaagggggtcgcacaagctggggctgtactttggcgtttctttgtatgccttaatgattttttttttttttggttgaaaactagacatttgaatctaataacatagtaattctggaaaccagattctcccctttcccagggcttattgattcttgttttatgattgttggaagacggggtccttattgcccactctgactcccacaagctgtgtgcaggctgctccaggaatacgtgccttgtccaaggtcagggatgggtagttgctgctgtgcttcaagctgaaattgaccacaggcaaccacagcttaccgtctaagcatttcctagaaagttgcaggcgttcagatagactcgagttccaaatagttacctcggactcattttgtcagtccagttgttgtctaggtgaggagacagagtcctagtcttcctactctgccatcttcccagaataatctccccatctccattttcaaagaaaagaatgagtgtctgtcatgtaagaatggctgggtagggtctcaccaaaaagcaggagctgggctggttattgtaagtgtctttgtttttttcagtgttgttctggttgtaaatagacaggtatatgaaaaatgagccccacagcaatttaaacaaaagcacagtcctttcaccacttagtaatggggatgttttgtgcaagcgtcctagagtgtactcatacaaacctcagtggagtagcttgctacaatcactcctaggccctatgggacagccttttgatcctaggctacaaacctgtacagctgttactgtcctgaatactgtaggccgttgtaacacagtgttacttgtgtatctaaacatagaaaaggtaccataaaaatgtggtaggataatcttacaagaccaccattatatatgcagtctgtttttgaccgaaacgtcatgtggcacatgactgtatttaaacaatttgtcatttgccttttaataataaagaatgaggctgggcgcggtgtctactacctgtaatctcagcagtttgggaggccaaggtgggcggatcacgaggtcaggggttcaagaccagcctggccaacataatgaaaccctatctctactaaaaaacaaaaattagctgggcgcggtggtgggcacctgtggtcccagctacttgggaggctgaggcaagagaatcgcttgaacctgggaggcggaggttgcagtgagctgagatcgcaccactgcattccagcctgggtgacaccgcaagactctgtctcaaaaaaaaaaataaaaatagttataataataataaagaatgaactataatgaaatattttcagacatgaataagttggggatttagaaacatgtgaccagccttttactgttttaaaactctttaggtgacattgacatcaagtaactcgcctgctttgttcttttttggaggcctgtgtcacttgtgaaaatgaagattcagctgatggtgcggccacatcctgtggtcaggttctggtagaagacagctgttgagtgactgtgaggatgaaccttcataccctttccaagacgtgttacacagacagacctttttaagtcctggacttttaaatgaccatgaagttatcattgaatgttaagattttttcttcttgattttttaatacacgtaatctttttgaagcagacattgtatacagaatcttacttctctttgttcctgatatattaaaatggccagttaggctctttttgtagttgaattgtcttctaaagagattggatggcctctaaagaggtatgtgtatctttatttcagatgtcacccagagtaaattataattagaagtatagctagaatgagccccaaaccttagcctcatttattttgttctgttacataagtcattttccccttagagtgcttgaagaaatgccacctacaggttgtgtacttttcataatggtttccatgaatgtagtacgttcatacaggcttcattcaacctggcgttcccctccataattaagatgaaacattccggttttctcacaacacattagcacatactgtccattagcatatctgggataaccaggttttgggggttgagttttggccttcatccttgtagatccctttcctattgatttcccaccttccagtgaaattctgaaagtcttatcttaaaaatcgatccgcttaccatgggcctattcttgtaagtttcagttagcatttgcatgtgtaatattaaaatgaaagagcttcttacccagtgctgttgcccttttgagtatttttgtttttaaaataatgattgtaaaatgttttacaagtaatgtaaaagctagtatcattcttacatacttctgtgtttaaattttcattcttaccaaaacagttaactctttctttccaatcaatttatacaaaagaggtcgctccagccctaccacaggtctgactggcactgccttttgtttgcccttgaacagggcagtgttgtggggactgcaaaagagaaaacgtccaggcgagcccagttgtcctcgcccacagggtcctgcaggctccatcagtcaccgctttctatggcgtttgtagttgtgtcttttaagaagtgagtgtgattgtttacttgataaatcagctcactctctggtgctttttagagaagtccctgattccttcttaaacttggaatgatagatgaaattcacacccctgcagatcagaaaaaacaaatagaagaaaatgagggttacagtaacctgttgtctttatataacttgcaacaaactaatttatttttttttcctttttttgtttttggttttttatggttttttaaggaaaatacttttctcctttgaagttttacagctttttgtaaatgcgtcctgataatgattaggaaaatcgaccttttcatccatgatgaccatcctcatagctcagatctcctttcaaagtagtggctttctggatggtaattccatcttaaggtgtcagaactattttcaaatgctgcctttgacagttcttggaattttctgatattaagcagttccatgcaaatattcgtgttttataaatagctctcatagtctgctccatcttgatagttaagtgatttctgaagcgtttgtgtgtgtgttgatcaggttgtgtgatatttttgcttgatagagaatcaaatttgaaacaattaaccagccagtagattgtctgtcagtgaccttctgtagtaataaagtttttgccactgtaaataaaaacagtatccgtagctatcaggatcattgcgcactcatatatgctaagccttctgttctctaatagaagcctttcttttccattgtttctggatatttgtattatccaaatgtgcttatttctttgccttagcacacgttttatggagtacttgttatactaggtttgatttgaaactggtgcttgtcgcagaactgtcagagcatgaggagcgctcctcctgtgggtggacgcattcacgcactcccaggttgcacctgctgctggcggtgagcagggggttcagcagcttgaccgatgccccccgagggggctctccccagcttaaactttgttgtttaaatttgttaactttttatattaatgactattgaaagtggtaataaaaatttatattataggcttcaatgttttcatgaatgttacccaaaaagctgtgttttctttggtcagaggtcaaaatttatgaaaaacaaaatgctgtatgaatggaaatcattttgcaattgagtgacacttcattgtaattcacagtgtaaatttaatccaaactgaaattttgtttcaactgaatttgtaattaactctgaatttgtttttaatcattagtaatatttcagttgggtatctttttaagtaaaaacaacaaataaactctgtacatgtaaaacgtgagaaattgtcctgccctgtgtcaacaaatctttgaatgtgtattctgtatcatttagaagtgcttcttatgatctattgaggggccctcatattagttaaccttgtgtttctcaggcacattctgtgtttgccttggccaatgtgtctgagcacctactatgtggaggatgaagatgcaggcactttgaaatgtattggcttatttagcccttttacacctagtgttccattattggaacgctaagcttgtgggagctagggtgaacctgtgtacaagatctgactgtgtaactggtggcaacaaaatctagaaattaaaatagggaacaagatcctgaagccaacagagctttttaaagtttacacctttcagaccatttgcacctttcttttctataacaaaccataataagagcaggaagaaaaatagctaagtatactttgcgtgtatactactctgacaggtgctggtctaagtgcttgatgtgaattatttaatcctcacaactgccctgtgaaataagcattgtgttattgtcattttacagagaagtaaactgaggcagggggagtcaagtaactggatcagagactcacagctggtgtgcactgggagtaggaatctgaccctagaaacctgatgcaaagccccaatctgtatgaatcatcacctgatacactaaaatgagtagggacttcagaattctgcagtggaattccacttttaagttatctctgatacaggaatagttttatggtgccaacattgtnttccagagaactggtttaatttcaacactgagagacacaccacagtgttatcatagctgtcctcaatgttagcatgtttctgagcttgcacattcattccagtttaaaacatctctcccttagatttgttcttgatgtctttttttttttttttttttttttgagacggagcctcgctctgttgccaggctggagggcagtggtgcaatctccgctcactgcaagctccacctcctgggttcacgctattctcctgcctcagcctcccgagtagctgggactacaagcccgccaccatgcccggctaatttttttgtatttttagtagagacgaggtttcaccatgttagccaggatggtctcgatctcctgacctcgtgatccacccgcctcagcctcccaaagtgctgggattgcaggcttgagccaccccacccggccaagttcttgatgtctttagggtaaacgctctgagacctgtactctctaggaaacttgtgatggtcagtgacaagattgacacaagtcgtgtgttgctctttggttgttgcagacccctctggaatgtggtgggatgtcagagctcaatgagagaaacaagtttctcataaacatccaggcctcccctatacatggttctgtgtagaaccacacagaactctcaggagttcacactgtatattctatacatacataaaccacatttatacagatgtattcacggaatagaagtcagtacttacacacatagtttttaaaaattcgtaagccaggctctttcttccacaatcttaaatcttgcctcagctttcttctctctgcaagagacatcaaggtgtttttcccggtgtaagaaactgtgatccttgagctcacagacgctgagatcatacaagtttcaatgttaaaagattaaaattgtcaagtgttcaggactttggtcagccaagagaaagaatctcagcacatgaacttcccccacgaacttcagaaaccaaggagcatcagacactcccgcccttcatctcagacacccgtaactagagattttttccaagccaagatactgttttctttttattttgttttattttattttttattttatttattttattgtttattttcaagacactcttcctctgttgcccaggctggagtgtagtggtccgatctcggctcactgcaagctccaccccaaaggtctgagcgattctcgtgcctcagcctcctgagcagttgggactacaggcacctgccaccatgccctgctaatttttgtatttttggtagagacagggttttgtcatgttcccaggatgatctcaaactcctggtctcaagtgatccacccatttcagcttcccaaagggctaggattacaggcgtgagctactgtgcctggctgtgatttattttttaaaagtaatatgttgtctttttaaaaggttgagaggacatcatagctaagataatgtagtttatttaaatgatttgccatttaacaaaagtttaacttttgtgactttttcttagtgtttgcttctgttcattcattagctttgcttctgaaatgtcaaagaattttctaaggataaatggaagaaaagaataattataaattttcaggacatgtttatagggaaaataaccactcatgatatgtgcaaaacatagaggatttattttccaggtaacaatgaacagggtgtagtttgcctagtttttctccacactgttttcaaatcaagcattgtgttatttttcatattctaagatgggtgtttctgagctgactaacagatgcttatttcacttcagacacagtatttccagaagcaatcaggagtctcacgtttcttgtatggtttccagattctggccaaaagatgactcagtaaaatgttaggatcttgtccagagaaatcctgaaactaaaacaatccaaacgaacaacaacaacaaaaaaaaacagataagttaccaacgagtgacgattcctataagaaaaaggaatcttgagtcaagacactggacttcttaaaagtatttgcatttttccctggactataattgtaacaagagtgtcccgggcccgtggggctcctgtgcccacctccctacctctaatgagtgtccttccagtctgttcagcccagcgattgtcctgaattttcctaaaccctcattgaccgatttctatttaaatcatttcagcggctgggcaggtggctcatgcctataatcctagcactttaggaggctgaggtgggcagatcacttgagcctaagagtttgagaccagcctgggcaacatgatgaaacctcgtctctacaaaaattagctgggtgtggtggcgggctcctgtagtcccagctactcgggaggctgaggcattagaattgcttgaacctgggaggtggatgttgcagtgagccaagatcacaccactgcactccagcctgggtaacagagcaagaccctgtctcaataaataaataaataaatagtaacatgttctgtgcatgtattgtcttctgtgtattgtatgtattgtgtatactgtattgtattgtattgtattcttttgagatggagttttgctctgttccccgggctggagtgaagtagtgcgatctcctctcactgcaacccccgcctccaggttcaagtgatcctcctgcaccagcctcccgaatagctgggattacaggtgcatgccaccacgcctggctaagttttgtattttttgtagagacggggtttcgctgtgttgcccaggctggtcttgaactcctggcctcaagcaatccgcctacctcggcctcccgtgctgggatgacaagtgtgagccaccgcacccggccttctgtacatcnttcaggtcaatgtctggagcatggccttcctccattagatgttgtcttgcagtgcccttcacactttcccatgcatgtgaatcacctggggatcttgttaagatgcagattttgcttccgcaggtcctaggtgggcctaagatcctgcatccctcactggcttccaggtgctcccggtgctgctggcggtgggccgcatgttagatggtgaatgagagcacaagtggatgccagactggagagcagggacctcacccatttttttcattctttcacaacttatttgatttacccaaaacaggcactgggtaggttcctgttgcattcagatcttatatcaatcaaaatttggaaaaattaatgctttgaaataatgctggccaattattattattattattttgagatgaagtctcattcttgtcccccaggctggagtgcagtggcgcgatctcagctcactgcaacctctgcctcccgggttcaagcgattctcctgcctcagtctcccgagtagctgggattacaggtgccaccacgcccagctaatttttgtatttttagtagagacagggtttcaccatgttggccaggctggtctcgaacttctgacctcaggtggtccgcccgcctcggcctcccaaagtgctgggatcacaggcatgagctaccgcgcctggtcatgctggccaattattttaaggtgtggtttccaccaagaacactcctctagttcatgaattcagagtcctgtaaaaccagtacagaatgttcacctttttaaacctaactcataaatagagtcacttacctttctcaaatttcctcttgggttaaaaatgttggtacttgagtctgaaaaacagttttgaagccagttcatcagatctgttgtttctcttgtatgcttgttttaaaatatacaaaataatattactaaattatgtctagtttctggtctttttccacactgcagcaagcttttcttgaatgcagaca

SEQ ID NO: 16 - DNA, 37500 bp, Homo sapiens
  modified_base (432)..(432): n is g or a
  modified_base (531)..(531): n is a or t
  modified_base (12021)..(12021): n is g or c
  modified_base (18957)..(18957): n is c or g
  modified_base (23011)..(23011): n is a or g
  modified_base (23552)..(23552): n is g or a
  modified_base (24915)..(24915): n is g or a
  modified_base (27468)..(27468): n is c or t
  modified_base (27542)..(27542): n is g or t
  modified_base (27665)..(27665): n is a or t
  modified_base (28226)..(28226): n is a or g
  modified_base (28261)..(28261): n is g or c
  modified_base (29155)..(29155): n is c or t
  modified_base (30747)..(30747): n is g or a
  modified_base (34155)..(34155): n is a or g
  modified_base (35587)..(35587): n is t or c
  modified_base (37025)..(37025): n is g or t
tttccttaaacatcttcattcatacactacagctgaaaacaaaatgatgaataaaaagtaatagtacataaggccgggcatggtggctcatgcctgtaatctcagcactttgggaggccgaggtggatggatcacctgaggtcagaagttcgagaccagcctgaccaaaatggtgaaaccccatctctactaaaaatacaaaaaattagccgggcgtggtggcaggtgtctgtaatcccagctactcaggaggctgaggctgagatgagataggagaatcccttgaacccggaaggtgatgttgcagtgagccaaggttgcaccattgcactccagcctgggcaacaagagcaaaactccatctcaaaaaaaaaaaaaaaaaaaaaaaggaatagcacataaaggtataaagctgtcatgtgtttgccaaangataatgttttctattatgatagaagattggccccaagagtagtcatcacataaatagttggaattttacattttttaatttgtgagtgcaaatcttcnttggtgaaaaaatatattccttgttatcagctagaccttaataggtgaagctaagtaggtgagttatacttttaactgtggtaacccattttttaaatagctacaaatcactgtagagcgagatataaaataaacaaaaaagatgtttgctcattttatgtatacataagtctttagataaagagctgtagaatgaccaatttctaaaaacaccaatgaaacattagaaaattataaatatatgccaagtaattattaatgcctgctttattctaggatatgccaatttcaatagaaaacacaaaagaacagaaaacatagttcctacatgctttgaaataataaaggtcagtttaaggccgtagaaaggcatcaaaatatttttctgacacataatactaaaaacaaaaattagcatttatggagcacttactgcatcatcaaacacctttaaagcacataacatgtgttatcttcttattcttaccactgtacatttggagaaactaaggttcaaaaaggttaatgaactttactaaggtcagacaagaagtaccagaccttggacacaccatgtgtccttcagctttctaagtatatgtctgaagctaagattttatgatctagatgtcaaagtaggtgacttctctttcttatgttgacatggataaacaagcaataagggtacaacacctgtgcctcaatatacttatctgtaaaatggaaagacgacgagcctctttgttaaagaagcatatctctttgagtggctagaagggatacacaccacacatgtataccaaacactgtttcatttgctggtggcatagcccagcctccacaagatcgtggctaaattgtgccagagatttcacccccaaactgatcacaacagcacaaggcattaaacatcacaggcagcacgttcacattgctcaaagtcacttgtttttagcaaacttctgggagaagaacatctctgaggactagattttagaaaacctccagctctgtgaaaacaggactcacctctaggaaaccacaattagtcacagtttctgtcactgagaggtgggcagctgttttccgtgttcatcgcatctgctggggaagcaatgccaagcagaaggaaagggagacacctgaggcacagtgtggcctgcacagttgggttaagataattttgagtcaaccttccctgtctatggctgctgaaaactcatagttcccctctctaaagcagcaggattgaggaagggctcacccactctcacctccttccaactttggctttcctccttcctctcatctcctctacttgcaagccattcggcttatacatgtcaatgctgtttcaacaacagactcagtgggtttgcttcccctgaggtcttctttctctctctcctcttcccattcctcctcttaagtctgtctcttgccccagccttagaacagaatccttgttaactaacccttcttctgtactatacaagagaggagttagagtacacgttgggctttgcaacgggtctgctttcatttgttaagcaattgttttttatttggatttcatttattcatttaaatatttatgaagccctactacttaccctcaggatgctaggcattctaaaggaatatcttgctagagaaacgtctccgtttagattgtaccttaagtttcagtcacagcacagaaaagggcttctttggaacctgtgacaggtgaccgtcttctccttttcctctgcagttagattcagggcgactgctttgggctaaattatgaaagacttaagcaggagtaaagagatttttctgaaagtaaaaatatctaaatacctaaatagattcccgagggctgttgtgtgtctctttgaagatctttaaatgcggagacaaagaaggcgtctaccagcagagggttgcgtatgtctgagtgacctttttatgatctcttttgagtccgtgaaggatgcgattaattaaagtcggaagtttgtcactgaaataatagttatgagatccagagaattcaaggtgttggaggactcattaagtagttgcataaatatcatgctgaaagatttaatgagaccacagggtcacttatagaacgatggtgcagagatgacctagaaaaaaataaattagaatcgatattgtgcttctgaattaacagctatagattgctatattaacacctgagacataaattctataattatatcttaatgatgaatattgatgttcttgtcacggaaaaaatgaaaattgctcacatttagtattttacttatcaatagtaaaataaatgtatatatgcgtgcttatttctgtgacatctgggaaccgtgaatgctttaagtagctacaattaaatgaatagtgttttttttttttccttttaattcaaccaatagttattaaatgcctactacacagcaggcactgggctaggtgctgggaaaaaacacagatgcacccttttccccccttcaagttgattatagtatagtgctatccaatagaattttctgcagtgatggaaattttccatgtctcagtgtccagggcagtagcaactagccacaagtagttattaaccatttgaaatgtggctgatgcaactaaggagttgaattttttattttattttaactgtttatatttaaatataaatataaacagccacatgcttaatcttagtttctaatgtgtaatccaccgttgtgtcaaaaaggattgcactgggacaaaagactatgttcatcattataaaagagctgtttacatgggaggaaaggctgacacataattgaggaaaccaaggaaggcttcacagaggtggcagtcactgagctgagacctagaggagcagataagaaggacttcctcatgacaatatgaaaaagcctgagatgcgagtatcatgttacttgcatcttgtggaactgtatgtaatttcatcatttgcatgttgtgttactctgctcagcttccacagcaaaatgtcacagactgggtggcttcagcaacagaaatttattttttcacaattctggagtctggaagtctaagatcaaggtgcccgcgagattcgtttctggggaggcttctcctctgggtttgcagacagtggctttttgccatgtcctcagatggcctttctatgcacatgcacagagagagagagagcgcatgcacacgctggcacttcttccttttcttataaggacaccagccccatcagatcagggacctactcataggagctcatttaaccttaattacttcattaaagatcctgtctccaaatataatcacattgagggttagggctttgatatatgaatttggggtagacacaattcagtccataaaggaagtatatctctcacacatagctcacacaaattctgtagaaaactatcatctatttacctagcatctggtgattttaatcactgcttttgacttgcatagtgatagataacatagggttctagaatagtaacaggtataaaaaatacctaaaccaaagtatccacctcacagaactcgaatgtaattaaatattgcttaagcaaatattaattttcctttattctttgaagacaaaccagtggtgagctggagcttactatctaagctcataagagtccattttaaaatttttcagggattttgtgacctggttattcaacacaaccattactacaaattaaattatataaactttcaatgaaataaatttattcaaaacaaatgtaacaaatactcataactcatcatttaccaattttttcctagagctttgttgaagcactttttaaattttttttaagacagggtctcactgtgtttcctggctggaatgcagtgaagcgatcatggctcactgcagcctcaatttcccgaggtcagttcaatggatcctcccacatcagcttcccacgtagctgagaatacaggcttaccaccacacttggctgatttttttttatttttagttttgtagaggtggagttttgccatgttgcccaggctgatcttaaactcctgagctcaaagcgatcgtcccgcctcagcctcccaaagtgctcggattacaggcatgagccaccatgcccggctcacttacaaataatttaatacctctcactattgccggtgctctcactattgctggtgctctctaggtactttgcatctttacatctactacgcaccatcggtagtggtggctctgacagtctgctactgtacacctcctcccaacgccttattcaaggtcacgactttgttactttgagactggctctgggcaagtatttacaccattgaaaatcaacaatctctaaaactgggccctttcattttccaggagagccgtatattaatcatttaccggcataccactggcacaaaccttaccctctttcatggtacagggttttcccagtatttatctggagttcctgttgcagctttccatggttgaaacattattacccatcctttaaaaacaaaatgaaactttttactgaaataaattaccttctttaaagcttttttttctgtttcctccattagacagagcctgtactgctctgttgatctatgaactttcaggccctcagtataaaatgttttaaggacaacagaaaagtcccctaaaacttacacctagcattgacaacatttttctagccccctcagcaatgtcttctacctaaaattgcctcagctgtaacgtaacatacctcctgctgctagtactagctcacagctaatactaagcgtaacacctgactccattttacaggggccactttttttcctctaaaagttttatgtagcagtaagtgaaatagaatagatgctggggtaaacagcagtttccagattaaatgttattttctgtaggaaacatttctctccaatgttgccccttcacaccatccccaaacaagtaaaaagttgctcagactttgaaaatgtaataccatctggcagaactcacattcgaccttttattaaaactacaattatgtcacacctgtgaggtttaaaattcaaggctccggaagttaaagcgacgtgtccaaggttacatggaaaattcttgagagctcacagtttcctgccctggcctttcacttcggatgtacaccatagtacgtgtgttttctgattagagctctcttcagttatgatttattttaccatcataacattttgggaggctggtatgagggagagtatagaagaaggaattcaagcagaaaaggttaaatgatttacagttttcgccctttctccaagggaaatttatgtgcccccaaattttagaatcatgaatttagattgaatgagaatggataaaatccatttacagtcaatttagattgcataagaatggatgaaatccttggcatatctaaagaatggaaaagggatcccaggaggtagttctggataacttttaacttgaaaacgtctggtagaggccgggcatggtggctcatgcttataatcccagcactttgggagggcgagtcaggcagatgacttgagcccaagagtttgagaccagcctgggcaacatggcaaaaccctatctctacaaaaaatacaaaaattagctagctgtggtggtgcatgcttgtagtcccagctacttggggggctgagagatgggaggattgcttgaacctgcgaggtcaaggccgcagtgagccaagatcgcactactgcactctggcctctggcctggacaacagattgagaccctgtctcaaaaataaataaataaatagtctggaaggatagaaaaagcaagtgagaaacaaaaaagggaccacctatgaggtaggaggaaaaccaagagtgtcaaacaaacccagaggaaaagcagtgcatgagtatgaagggcatgatccccagtgtctaaagttggtgaatgctacaggagagtcttctttggttttagtatccaggaggtcattattggccttgatcttaatgaggaatcagccaaaaggtggggaagggaaccaggtaagagtggattaaacaggagaccaggaacaggagacagcttatctaacactcatttggaggtttagactcgaagggaagcagggatctggtctagtaatggaggaaataggagggaaaatccatttgagaagagattaatgaatccttctaattcatggttcggtctagtttatcatgaaacactaaatcaaatgaaagagttgcttctatagccctgtgcacttccatcagcagattttatattgagttgtgcagatcaaccccattgccaaggaagaacaagaaaaagatatttcacctacattaatggttggcagagtggtttttccctctgataaattaatattcaatggaggaacaatatgttaatgagtatacagcatatattattcagaacaataacaataaaggatttctgtagaccttgtttaaatgttaggttttcttttgctgttgagtacatgaacagcaatacttacacaacttacatcatgatcgtcagagccgatacagaaagccacaggcctgcctggctgctacactgaggtgtctacagaccaagaggcttcacatgtgcctttctgtaattagtatttactcagcctcctatagcagggaaaatattttgcacataataaactcatatatttccttacccattaaggggtaatgtacttaagcacattttcctgtaggatttttaccagcaaggtcgagtcatagctccaggagaggaaagaatgggactcactagaagagaagatcctcattagcaagtgaaaaattttgtaaaacagggattacaagagaggaaggtatttttttttcaaatttttcaaattcctttaacttcttctaacatggaagtcagatctggggggctagagccttgcttgctatatacccaaagatgacagaactcaggataagacatagaaaaagagaaaagcctgcccccttcttcctcaggccttggaatcgttggaagaagaaggggagagagagaatagagcaggaaatgagactttgtatgtacctctctgacttctaccctccaggcgaaaatccggaagattctggagcaggctcatgacacctcatatcttgtgtgtcttagaagggacacgaaagctcttgcatgtcctggtgatgggaaatggtggtgtgagcgggggctggtgtgagcgggggctggtgtgagcgggggctggtgaaagctgggacaagacaaagaggctccctctggtgttgacttcataactgaagtccgctggactcaagtaatgagtggacttggccagactctaccggggcatctcgccccaaatggccagcagtcttgtgtccatggagaaatctagaccaaccatttcacagcacagacctatgaggatgcagagagcagcctggcaggtctaagtctgtgcctttctcccccttggaagacacactgatttcctgaatagatttacccaccatttgggagagctgaaaatgggaaggacaactttacaagcttcaactttacccaaagagactgactcatgcaaaaaaacgtgtaaaaccaatcctatggggagtgaaatgttgaagaaaccataaggaaattgtctatttcctttaacagttagaaggactagggcagcttcccttcctgtcatgggaagtgtggctcctacgccctctgggagagtggtttgagaagtgtttccgctgtgacttaaattatagccatttcccgagcaggcagcccagggactgtggtaggcagtgccagctactcggagtcaattgaaagggaattggtcgcctgggaggtttctaacctgatttcaggtttcctggacaccgcgtcctctcctgacccaacacctgctgtgacagatagatgtttgtaatgaggtgaataacaaacagtctcatgaacattaggtcacatggaacaaaaggcacactggcttaggtggagcctgcattttcctgtttttctaatacatttctctaccaagtctactcactcgcggaaagctttggcaagatttttaggcaaagcctttaaactcacatttttttgaagaaaaaaatgtttgctatttcatggctgaaagagagactcaattctgctgttacattcagaaatctgtttttttgtttttaaatgtctgtttcatacttaaaatctcagaatatcttactgagaccagctctaaagtaaactatttcaccacactcaaagaagacccaaccatcataataaaaggggcagaaagaaacattgggaggtgatggatttgttgtaaaaatgaatgagggccaggcacggtggctcacacctataatcccagcactttgggagcctgaagtgggaggatcacttgagccaaggaaatcgaaatcagcctgggcaagatagtgagaccctatctctaaaaaaattttaaaaaattagctgggcatggtaacacatgcctgtagtcccagctactgaggaggctgaggcgggaggatcacttgagcccaggaattgcaggctgcagtgaattatgatcacaccactgcacagccagggcaacagagcaagattctgttttaaataaataaataaatattaatgaataaaatcaaatattcctaatagacaaactggcttttgacttttctggtggtatttcaattgatttttcctgtagcggaattcataggtgaatgcctgccacagcaagggtccagtgtgaatgaagctttctatgtgatttgtaggtttttcctctgccctgatgtgactaccagaagtggggttcagctgggagttttagaaatgactttttctttttatttaaattttgtgcctaattatattcttagatgtattggtcagagctttatcatgatcattcgtatatctacagtccctcagtatttaagtcttattagcaaaagtaaatgtgaaaaaggtattgtgtgagattttacaacagcccaagatgaagagtatagatgtgtgtggtgtttgtcgatggcattatgcttctatccttgttctgacaggattctggccttttggaacattctgtctaaggattgaagctaatttagttgagaaacctaaatattacatttcgagaatgaatttaacacctagatttccaatcttgaaattacaatagtcactcacttatcaaagagtagagtagaaaatagttctttccttttaacatcttttctctcttaaaattggaggacagggatttataagtagtgttccatctatccatccatccatttatccatccatccatccattctttcatccacctatccacctatggtatgtacttgcatgtgtgtgtgtgtgtgtgtgtgtgtgtgtgtgtaaacatatttaaaaggcaggtttactcattgcttttggtacagttctctaaactaaagaagcttatgttggtacttttattgtccatgaaattatattatgaaacaataacaggtaggaaggatgggttcccataaatatcctcttactctctttgcattttgtatcatgtgcactactaatctcttacatttgttaatccattgctatggttttgacataagttggactgacaccttcatttagcagatgtagaaagaggcccagagaggtccacttacaggcaggagtagggccaggccagaaatctagtctcccgtctttttgcttttcttagcaaacagattccccaatgagcagacttgattgtgtcttgctgcacagcaatccacactaaccatacaggtgtaatgtccattatctaaaaaccccagtccgctttgatttcggatcatgtgcttcccttctctactgtgcagatgtcaggtaaacaggtcatcgctgcactgcttcattgtttgttccagtcttcttttctctgggttccttcctttattcattttcagctgttatgaatttatacacaattaaagggggagggaggcatattaattgaaaaattgatgacataaccttgagggctttgctttaattacctccagtgtccaggaatgacagttcttcagatttatcttctcttccttaatagaggattttcccactggacagacttctggcaatatctggtgttcagactgtagtgccatgctctgctatttttattactcacacaaaagtgcgttgatgggccatgggcaagttaaatttatcatcttgcaacggtgggatgaaagagccattgctaaccctggcaaacctaaggtgtacaatttcacaaaattacatagatggtaagaggtggtgttgacacaattggagctgacactttcatttagccgacgtggaaagaggcccaagaggtccacttacaggcagtggtagggccaggtcagaagtctaatcttcagcctccttgctttgtactcccgacctcaaacccgaccactctcttctcccaaccataatgcatcttagtgagttacagtacaacaaaagatctagaaatatctgactattaaaaaattatctgctgatcataaaacaattgaaaacatagagaagaatttagttaggggctagatgtagtgtttaaaatttgaaaatcaatagttttcctctatagcatcaataatatctatctgtctatctaattatgtataatatgaaacaaaacaacagaaaccataagatatattaatagaacacatataacctgtttatagatattcctaaggaggattgtggcaaagattcctggaagtgatatttaatggtatcttataaaatggtagtgaagagaaaagtaaaacagtggcaaagaatatgaaagatgagataccagtgtataagagagcaataaataattaaaagcaaacaaatgggaaggaactgatctttcagaaaaaaccaggagatacagctaagtgcccagagcacaggatcccatctgagagggacactggaaagagaaaaccaagggaggtaaattatcaaagaaatattataagaaacattttcacaactgaagaatattaattaccagactgaagggccaaactgagtgcccagccacaagaaagaaatgacccacacttaggctccaaactggaaaattttggaataccaaaaacaaaaagaatttttttcaacatttccagaacaaaaactaccactcacaaattgaaagtcagaatgagatcaggcatctctacagaaaatgaaagtttgaagagtaaagcaaagcattcaaagtcctaaaataatttaatggggaattctgaagccatactatcaagccagagaatagaacaaaaacatgttcagacatacaaaatactgtaccatctatatatttttctaaaaggcaaaacaaattctgttctttctataagcatatatatgaatatgaatgaacagagaatttctgnacatctacataccaaacttaaaccatggtttacctgggggaggggactgggattagggaggtggccaaagggtgctttgcagctatccatattgtttgtttgcatgtgtttactgaaataatgtaattatgtattatctgggtgattaaaagtattcttcatgttaatgcaagataatccattagtgataaaagttagttttaaatgagagcttgtttgaaattctaagctttcctctaactgttcatctggaaccacttctttcaagtgccctttctatttctagctttaaaaagaaatccaattcaggctaaaaggagccattatagtttcttgatatcatcacatttctgttaatgagcccttcaaacttgattggttcttagtagaattacagtgattctgaagcaatcctgaagtcacctgtttccctctgccatagaaaatgccgcatctgttgctgatataatctaagataacaaaatatcaagaaaacaaaacagagagacctgagcttccaatgaaaactctgtataactttttaaaatatgtttaaatgcatcaatgaatgggaaaaaagtagagaacgctcagaggacaaggtccaagtgaaagcaggtaccagagaggtgagcagagcatgcaagctgtcctttatcttgaaggtgtctatcagtgtcagcttggtagaacttggtattgaaacttggtgtagaatagaggaggaaaaaattctccctgagaattcatgattgcaagctggtcctcactggggggtttgaagcctgaattcaccccacctgacaaactcagggccagactgaagggccaaactgagtgctcagcaacaagaaagaaatgacccacgcttaggctccaaactggaaaatttcagaataccaaaaaacaaagagatttaatttaaatctgtctcatcctggaaatcctctgggctcctgacataattaatcagtttgtttaaaaaggaacccatctttaaaccagaccttaaactattactacagataaagttccaggaaattcaccacatgaaagcaatcacaatgaatacgaagaaagtccatgagtgagaaagagcaaaaataacagacagcagaatgacccctacaaaaacttgagattttggaattatgagaaacagaatattaagcaagtacttttaaggttgacaatatgagtaaaaagcaactgactaaaaaaagcgatgaagcacatttgcaaacaaacaaattgattctctataagtgaaaaatatatttaaaatgcaatgcatagttatagcaacagaaagagaattagtaaatttttagtgatctatataattagcaagaatacagcaaagtatcaaagacatggaaaatatggtagagagatcaagaggcacgaaggatagaatgagaagaggtgagagcaaataggtacaggagattatctgaagaggttatgtttcagaattaataaaattaattctggattaattcatagattcacaaattcatagattaagaaatctcaagcatagtgtattttaaacaatgccacatctaaatataagtatcatatttaagttccagaaacacaagtatcatttaacaatgaaagtaataaagagatttttagcacagcccaggaagacaaaagatggggagcaaggatacagtgaggactgagggtttcccaccagcaaatcttcactaaaggaaatcatatctccatatgctagtcagacaaaaagatgcccactattatccctttctgttcaatgcagtaagacaagaagaataaataaaagatacaatgttcagatattaaatgaaaaaatatttgcaaatgatgtgaataactattcagaataatctacagataagttaatgagttagcaaatatgctgaatataaaattaatttataaaaatccatttcatttccatatataagcaacaggcagctagaataacttaaaaaatatataacatcataacaagtaaagttattattgggtataacatcaaacaaggtctattataacatgcttatgaattggaagagccaatagcataaaaataagttctggccaacatggtgaaaccccgtctctactaaaaatacaaaaattagctgggtgtggtggcatgtgcttgtaatcccagctacttgggaggctgaggcagtagaatcgcttgaacccaggaggcggaggctgcagtgagccaagattgtgccactgcactctccagcctgggtgacagagggagactcagtctcaaaaaaaaaaaaaaaaaagttctcccaaattgatctatagattaaatgcagtaccaaaaaaagtcaacatttgtagaatttgacaagctgattccaaaatttttatggtaaagcaatggcccaggaattaccaagatgtttctgaagtgggacagaacataaagattcatcacatatcaaaaatcattctgaatatgtagtaattaagatattagtgggatactggcagctttaacattggcacaaatatgtgatctatgaataagcgcacactgatgtgagaacttgatttatgagagagatggcactggagacatgtggagaaactcaggcttttcaataaacattgaaagaactattattattgatatggaaaaaaactaaattggattcctacctcacctcacacacaaaaatcctatctatgtggtttcaagaattaaatatgaaatataaaactataaatctttagaatattatgtagaatacctttgtgcatttgggaaaaggaaggtttttctttaccaatatagaaaaagaacaaaatttaacagaaagattgataatttgggctaaattgaaggtaagatattctgttcatcaaaagacactttgaagagagtaaaaagacagataactcctacacttaaaacttaatcaaaaattagtgttatacatcatcctttgctaaccatgagggatttgttctaggacccaccccgcccagataccaaaacctgcagatgctgagcacctgacacaaaatggtgtagatagtctcaaattgatttccagagggtttgcaccaatttttacttccaccaacagtttacagttgtcccagatgcaccatatccttgaaaattacttaatatcattagacttaaaaataaaaagtagcaaaacatgaatccctggtttagttggttaaataatggtccctcatattcctaaacacttcctcagatatgccagtgtagaggtataaaatagtgtaacactgtggtttatttatatgtattataaatatatattatatatagtaaaacctattcatcctcctatatatattaaatcctctccagattacttatactacctaaaatgccatataaatacttgttacactgtattggttataatttgtattatgttttatttatgtttttttttttcaaaattttttgagttacaattgggtgaataggtggatacgaattcaaccagcagatacagagaacccatggatacagagtcaactgtattatatagtattatatatactctatattatagtaatatattataacatagtattatattattatatatgaaattcctacagattaagtgaaagacaaacagtagaaaaatgtggaaaaactcaaacaggtgcttctaatatggaaaaacacaaacgattggcaacatataaataggctcaagctcattagtaatcaaagaaatgcacattgaaaccacagtgttatattattttatgccttcagacaggcaaattttttaagtctaacaatatcaagtgatttgcaaggatatggtgcatctgggacaactgtaaactgcaggtgggagtaaaaactggtgcaaacactctgaaaaacaatttgagattatctagttaagttgaaggtgtacagtcctataaccagaaattcctcatcaaggtagaaactccctagagaaattgtagcatatgtgtatcaggagcgttgtgccagagtgttcatagcaacactctctgtactagaaaaagaaatgaaaaataacccacctataatagtagaataaagcaatgttaatatattcctacaaaagaatattacacaacaactaaataaatatgacttgtagctacacataacaacttggataaatttcatcatcaaaatatttagttaaaaaaacaagtgggaggaaaatatatacagtatgattcaatccaataagtttaaaagcatgcaaaatgaatcaatattttagtatacaaatatgataccaatcaattttttaaagtatgagaacaataaaaccaaaaaattcaagactctcattacctctgaggagtcagggaaggagagaggattttataaactagtcagtaggtgtttatgcttcaatgttctttatatcttatgactattttaccctcttttatatgtactcaatattgaagagatcaaagctatcttgagtagaggtaaaagaaaaatttttttagttaaaaaatatatttaaggccgggtgcggtggctcatgcctgtaaacccagcactttgggaggctgaggtgggtggatcacgaggtcaggagttcgagaccagcctggccaaaatggtgaaaccacatctctactaaaaatataaaaattagccagacatggtggcctgcgtctgtatcccagctactcaggaggctgaggcaggagaattgcttgaacctgggaggcggaggttgtggcaagctgagatcacgcctctgcactccagcctgggcaacagagcaagattccgtctcaaaaaaaaaaaaaaaaaaaatatgtatatatatatatatatatatatatatatatatatatatatatatatatatatatatttaaatgacacttttaaaaatggagggaggagagtagttatgatatatcagtttactgtaagaataattttgacagatgggatattttcgcatgtcagcatcattcaaattttttattatgttaaactgattaacagtaattacatataaaaagtggacattcaagtcattcagataaagccactaccccgctctgtgggtttgtcagaaggtgtcaagtcctaccttctcagtaggcgtctacacagcctggcgctgtatccctctccacccgccccctcgcagtgtgcactatacttccactgttccagctctttgtctgtccccagatggaaccatgcttctcctgtttctgctgctaggccacaattcctccagatatctccacactggtacctttttctgcagttcttggttcaaatgtttctttgcagagagactttctcaaatggcagagtagtttctatcttttttccttttttttttcttttaatgtgtggcaccatcattctgaaaatatcttattcttgtgattacttgtttataacttgtttcgtccccacacaggggccgcgtctctgttatttctccaagcacctggcatagaggagatattcaacaactttatagaatgagttaatattttgcagactaaatagttgggcaatagaaggttgcatatatattcttattttttaaattggggaaacagtaaagttcagacccattcactttaaatattcatccaaaagatatttattaagcatttagtatgtgtcaggcactgcgctgcatactaagaatacagagtgaacaggaaggtagccaggaaccctgtgctgggaatggacaggcctccaggtgcctaagaagatcagagtaaaatcaggaaccaaatgatctggaagctaagttgccaaaatactgtgggtaggattctgggcatttttcttcaataattctatagtgatacctaaagccagtgtggagattaaaggatgagactatcagaggtaaggggagctttaggacacaaagctagtcattgcaccaatgccagagtttccacgagaaagaaaaactaaaaagcagcaaaacacaagtccctggattagttggttaaacaatagtccctcatcttcctaaacgcttcctcagatatgtcattgaaaaccccagctgggaagacccctctgagttccaagactgactaatgaaatgatatttctacctttgatctgttgcaataaaattaagatgtgagtagaagagaacagagatatctctataaagttccctgttacagctcagtcagccctttgtatccatgggttccacatccatggactcaaccaactgcagatcagaaatatttgggggaaaaaacggtgtctgtactgaacgtgtatagatttttgtccttgtcgttattccctaaatcattgagttaggtattatcattattccctaaatttacattgagttaggtattataactagcctagagatgattcacagtgtataagtggatgtgcaacgggcatatgcaaatactacaccccttttttgttttttgttttttgagacagagtcttgctctgtcacccgggctggagtacagtgacgcaatctaggctcactgcagtcttcgcctcctgtgttccagtgattctcctgcctcagcctccctggtagctgagattacaggcatgcgccactgcgcccagctaattttcgtgtttttagtacagatggggtttcaccatgttggccaggctagtctgaaactcctgacctcaggtgatctgcctgcctcagcctcccaaagtgctaggattacaggcctgagccatcatgccccgccagagccaccacccctgcctgcaccactttaaataaggaacttgtgcatccgtggattttggcatccaaagagggtcctggaaccaatcccccatggatgcctagggacaactgtattatattaggttgctaatcaattcgtgtacactttacccagttttataccatattnaactattgatatttgatttgacatacctgtggccatttttgaacaaggccattctgaactaatatgtcttgatgtgagagcatattccctagtggcatctttgtttctatggaatgctctgattcaatttatatccctttgatttatatcctgtttccatcagggaacaagctctcagcactaacgccttctacacaggaatgcctctaccatctctttcagatagttcagaaggcccttgaagatcttacacattctaaataccctgggacactttccaccatatcacaaggtcattacaattgtctgccagtgataattttgttccttaggttccttaacatttactcctggttctcggtgggtttgtcagcatctcacagggttggcaatgacacccactatacttctctctatcccgccttggggaatcagtttaacatcttatctccttgcttgttggaattgacacatccagcattcagactgtccatgctacatgtaggataaccaacaaacaaaattgcgttttttgaaacttaaaagctcaatacctttatttactattagactgcagattgttgggcctgtaagtaggacacacattgcctagagtggtccggctctgtcctttgccatctggctgcatgaatcaatgtcagctggatacaaatatatctctggaaaggggacattgggaaaaagggtggatacactaagcatagaccccagaacctgttctcagaaaaatattttcatggtaaatcctgagatattaaaggacaggtttaaaatgctggctgcatgctttctctgtcttttattttcattggatgctagaatttgaatgggccctgtttctgctttattaatccatattttgtggcaggagaaattcaggagaactcaggaatggcaggaagtggatgagaaagagtgtgtgatagaaactgcaagtagccttaagggcaaaacaagaataatgctactgagatgatgaggcttgcatatccagctggctactgtattctggccaccagaattggatttcagcttggattttcgaggcttagcagtacaatgaggactgggattcataaattataattataagtgttatttattaaaaggtagttttggtctcagaaggaaccaaataataataatgcatgcatcactgaaagataaaaatccataaaaaataattggggaatatgagataaggggaaaattgagaataagaataaaaaggtaacttggagtaagggaggaaaaattagtaagccaatcataacacacaccccataacatcctggatattggttgatgtctggatattgagttcatgggtcaacactggccacagaggtgaagcatcattggagtagcttgggcttgcaaggaaggttggcattatatctcttcccatccccagatgccaccatagactcacctacactatccccaggtcctcattgtactcattttattcattcacacgttttttgaatgtattcaatatgccagtgaccaagttctggagaaaccatactttgtaaaaagtagacattgtccctgctccagtgaaatttacccccccaaaaaaggagagaaggaaccaataaacaaatgatctcctgaactaattgtctagctacaaacccagacaagttatctgaaagaaaggagcatggtgccaggaaaacccagactggtctgagcaaggtaggtataggggatcgaagatcaggcagaacatcttggagcaagtgatatttgaactaagagccaaaggctgagtaggaattaactaggtaaatggtataaggtctggtagagtgagaaagagtgtgtggatgaagagaaaccctttcagatacggagaataatacacgcaaagtccctgtgataggagggaccatggtgtgtgcaaggaactgaagagtcatggtagatagaccacagagcatcaggaaaagaatatacaatggagccagaaaggtagacagaaatgaaacccataaagccttggctgctgcattaacaattttggcttttatcctaataagacttaaggctggctgaaggtagtgatatgatcagatttagactttgaaaatatttttattgattaatgtggggagcaaattaaagggtagaaggggcaagcgggttgcaaaagattagctagggatattatgttagtgcaggcaagagactctggcagtgtggagtcggtttatgacagtggtgatggacagaggtagaaggatgtgagaaacagggcctggagccggattggctgtaggatacagggaaagggaggagtcaaggaattgcctagacatgtggtttgtgcaactgagtggattttgactcccattcctgggctaggtgtcaaactgccaaactgggaatgagggggagggagccatgacagcaacgttggacatagtatgactgagatgttttcaggcatctagagaagtcatgtggatggtgaaatgtaccactttggaattgagaagagaagtcttagctggagataaaagatttgtgagtcatacataaaatggaaggaaagtggagagaatatagcatgacaaagaaaagaaggcctcaccaggcgcagcagctcacatctgtaatcccagcactttgggaggccgaggcgggtggatcacgaggtcaggagatcgagaccatcctggctaacatggtgaaaccccgtctctactaaaaatataaaaaattaggtgggcgtggtggcaggcgcctgtagtcccagctactcgagaggctgaggcaggagaatggcatgaacccgggaggcagagcttgcagtgagcaggagatcgcgccactgcactccagcctgggcaacagagcgagactccgtctcaaaaaaaaaaaaaaagaaaagaaaagaaggcctcagatggagccatggagagttttcaaggagcaactaggcctaggattattctaaactcagcactaggattgtaagggcaagtgtttattttctcaccattaacttaaacttcttctctattgttttgtgttacccatgacagaaaactctcactcatctctcactctagaatttcctcagttaaccctaaatcatctttgccaatgatgatagaagtttcactctaaatgggtttaatcaagatgaaaaatataatcgcatcattttataatgaataagacttcacaggtatgctaaatggttgttaccaaagtcatttaaataatagtgattttatgcgtctgtgtttcagtggttggcttctctggccttgacctgtgagctcagcatgaagtgctgagatttgatttaagatgacctagagtttatgtactgtcatttacttggaaattatcactttgcgtatttcagatgacatctcttaggtcagttttgcaagttcattatttcaagctgtctaaaggaggtataggattttgtaacaagtaattaaggaaaccaccataaaagtttaagtttatactatatgatagttttcattatccaatgctgcattttttgtaatagacattgaataggagggaactatccttactaagtggtaggcatttttccccatgattatttgttcactgaatttggaagtgatggaattccaatgaagagctatatcaggatcatatgcacatgtgcagtataggtatttgcatttgctatgtgtgtttccctgtgttcgcgatgtaatatataaaatcaagacatcaactgttgtctccccagagttatggctatataacttaagcagcaaaggaaaggatttaggggtccattttaatgtaggcaagagataagaccattttttcaagttaataggaaagaaaattatggagctgtactgtccaaggtggtaaacactagccatacagggctatttaaatataaattattgaaaaattgaataaaatttaaaattcagtttctcagtcacactagcacatttcatgtgctcagtgttcccatgtagctagtggctgtggtattggacagtgccaatatgcnacttttccacaattacggacagttctattgaatagtgccaaacaagaacagggttcaaatccaggccagtgcctctgtttgcacagccagtgcactaagaatgattttgacattttgaacggattgaaaaataatcaaacgaagaagaatattttagagcacatgaaaatcatttgagattcaaattctaatgtcctcaaaatttctattgagcacagccatgtgcattctgttatgcattgtctatgtgttcacactacaacagctgcattgagtagttgtgacagagactttatagtctgcaaagtctaaaatatgtactccctggctctttaagaaaagtttgttaactcttgagctaaagggaggaaaggagtagtatcacacattaccgtcataaaaaatattctgtatagatttggaaaatgaagtcaataaggagaagggaaagtgtatctagaattcatgcccagatttgatggctgtgggatatcctgcattggggggtgtgatggtggatgggttgaaagctctggaaacgttggcaatagcctttaacatgtatccaaaggctccatcaaaccctcagctttctcagtgtctttgcaggttttttaggatactctcaaaagctcacttctctctgtaattcaccatcttccccattgtaaaaggcaaattaagtcctctcaaaagtttgacaatatgaaacaaggaaattcagttagtctcttgacagcaatgccaattatcttccttttttttaaacattctcttaggcgaatgcctaagacaatggaaaattattttgcagtgagacccaagccaatccagacacaagctgctctcattacaaccatctcttctcatctcttgaggatgagctcactaataagagtacattatctcttattgggacaggcttaaatacatgcaagaacttcattaagtcattctctatcagaataggagctattgagaatttctgcagaactaggattgtgtcttctctacctatgaaatgagtggtgtcatgacaaagcactctagggagccctgccaacctatttgataatgttgatggacaagattgtatggggagtggggagaaaaaacaccttttatattcttccctgatgtatgtataagtagttctttaggaagagatgaaatgcgtggctttgtcctgaatagattcccttaggggacacccagggaattcctaggcccagtggaattaatgttctagaaagagaatcatgcttctgttgcagagcccccttcttaatcctcatgaatcctagttaataacacatataataaagtattcttattgatgcctgtaacttcctttgaaatgcacccaaaaggataaatgatatagacatatgctaaagcaagtatggtgaaatgctacgggtggaatctatgtggtaggtatatgggtgtccactgtaaaatgatttcaactcttctatatgtgaaaagattttcataacaaaatgttagggaaaaaatcctcctggaatacatttcatgtaagcctctaattcctcagcattagccacaagcagaactgtcttcaaaggagtaaatcatcaggaaaagtccgtgaccccaaaagagtgctgtccaggttttctcaggcatggctcaggttcaggcacaaatgcaagttcccagttcccatctcctcagtgtgtgcccgctgacctccctgcaacagttctgcccattgaccagtaggggataattcagatgaacaccttcgtgcttggaatatgagcacttagacttctagattttaaaaggatttctgagcccgatctttacacacatgctttagtttgtactgtctttctgtacatcctcagttaagagatgctttctggagtgttttgtanatggatttgaagacttctcactgcttcagtacagaatgccctggcaatgcacgcctggaaggagtccatggactgatattttctagccaaagggagctaaaaatcagccattttgacatttggatttttcattgatgtgtcttgtttatttaattcaatttaatatgaaagagtagagagggtagaacaaactgttcagcaacgtatagatcattaggttttaaaaccaaataaaaagtactcagtgtaaaaatttgcctgactgaaaggattttgaaattattcttgaaagctctgaagcacgcagaggcagctttggatgtgatggatatttttgctgcatagagtatccagtgccaaagagatgattctgtcagaaaatattacgaagccaacctagctttgataattgcttcagattgtctacatatataatcctaaatctcttttcaaagtacttacactaccagtggtctttgatttataactgctggtccaagagatggcctactaataatataaaacagggtcttagcttcactgcgtatcgtttccagaggatgtgaatcttaagtcaatataagagatgtgtgagtaggaatgagaactcttagaaatcataggaaggggttcaagtcacagggaacagcagatgtagctggcctaaggcaaagggaacagtgcaggatcagaaagaagtccattccaatgaaaagagctgagaccaagggaaaccataatggggccagagcatgcaagaccattgcaagaagcatcaagggcttggagctttatccagaagacaggagcagccattgagagggcatgctccagcttttgttttagcagaatctctttgcatgtgatgtggaaaatgaattggagaggggaaccaggaaacctgttaggaggctacttctgtaatccatgaaatggcaatattctgcttttatgtccctgagaagaaagcataggtaaggaccactgaatacacatttggtagaaaaagaatattccccggctaaggattgggaagataaaacaatcaggaccacccacccattacttcattttcctttatgtatccgatcaagtaccctttctaaaagaaggtaaactttacagttttttttttaatttaagcatctcattagaacctactgaatatgagtctccatgtactaattgtagtaaaatctctctgaaggctggcatcagtatgtctgggcaggatgtatattctagcccagattttgcatagatgtcacaaggagtccagaatcccttgattttcagacatagccattagaagcacactgatcttcacaggtggaggcctccactgccatcagtctattactgctgcttaaattcacagcaccgtggacaagaggagaaggtagcctagctgtttcattggcccccgcatctctctgccacatgatggacagccatatcagattgcattagaatgttgactgcatgttaactggtgatccttcttcctctcaatacttattttaaaatcactctaaacgccctgctcttattactaattagattatttggccttggtgtatagtgtcttggggtcatcagtatgaaggtcaagtcacgcaaaaagagtggagtctccaatgtggatacacccaggaggtcactctctccccaggctgtgtccaagtagcataggggagcacagggctctgtccccatgatgtactgtccttttccatgacattggagatgaagctggacctcaactctgcacatgcatattcctacaacttctcagagtcctgtggataatgacggaggagagaaaccatgcaggaaacagccccctagagcacccaatctggatctaagtttgtcttacatgtttaagaaaaatttgctttaatttattttactgtattaattgattaatttttaaagaaatagtggagtccatcactaagacctcaggccataccttagatattgagatgttgaataaatcccaccagtttattttattgtaatgtgcctcatttttcctaaaaactaaaccccaaaatataaaagttttcgttgttacttatttatttattttagagacaaactctcactctgtcacccagcctggagtgcagtagtacagttgtagctcaccatagcctgaaactcctgggctcaagcgatcctcccacctcagcctcccaagtagctgggactacaggcacataccaccatgcccagctagttatttatattttgctaaatgaatttttgaaataaatttcacagatatttccccattttcagttgaaatttaattttctttctttctttctctttctttctccctctctttctttctctttctttctttctttctttctttctttctttctttctttctttctttctttctttctttctttctttccttctttctttctgtgcttctttctttctttcgtattgctccttgtgtagcagggctatcccataggcagggtgcccagggtagtgaaagtttaattttcagagtttttaatgccagaatcngacttatgaattcactcagtagatattacatgtcactggcatatgaccttttaatagatattttattggcctangaatggtaaggtcagagacttgagtggttccacttctaacagcaaaaagaaactatttctggctataataaaatttagcatcttaaaatttaaatagaatagttgtttatacttactcagggnactggagggttatatgggatatttaaataaattgtggaacacttggtcctgaaaactgcccattataatactttaaactaattaaatttcatttaaaagtttcaagcttcctgaacatcagggaaacgtgaaaatacagtcatgggttatagagactagcatcaggaaaaacagccagaaattctgaacttggatctcttcgcatgtccttgttctgcttaagaaattgcttaagagatgaccttgataacattttaaaaatttgagtgcgaagtgcaatgtattgcctttccatggattagagcacatgataactcttgagccagattataggaatccctatcataagattaggagaagtgagagaaaagaatcagaatcgaaagcctggcccacaggtgactcccttgtctaaagaaaacgcttggtcttgctttcagcacatggcttcctgaaaacgaactttaccttaataagtaactgtttaaaactttacttattaatttgaattagtttgagtccttagggaaccctgcgagggtttagttgtcttgattacanaggcccacatccctcagaaagtaccctcatgtcgncagctggacaaccttaaggattgtcattgtggaatcacggcacaatccaatttcttatctcactgttatgagttgagtggtggtcaccaaaaagacatgtccttatcctgtttcctggaacctgtgaatgttcccttgtttggaaaagagatatttaaagatgttataaaggtaaggattttgcaatgaggagattatcttgggtcttccatgtgggccctaaatccaatgatgtgtgtattagtctgttctcatgctgccaataaagacatcccagagactgggtaatttataaagaaaaagaggtttaatggactcatagttccacatggctggggaggtctcacaatcatggcggaaggcaaaggaagagcaaaggcatgtcttacatgacgacaggcaaaagagcatgtgcaggggaactgtcctttataaaaccatcagatctcatgagacttattcactatcatgagaacagcacaggaaaaacccacctccatgattcagttacctcccactgggtccctcccattactcatggggattatgggatctacaattcaaaatgagatttgggtagagacacagccaaaccatatcgatgtatgtccttaaaagagtgaggcagggagagatttcacacagaaagaagaggaggaggaggcaatgtgtccacagaggcagagattggagtggtgcaggctcaggtcaaggaatggtgacagctactaggaagtgaatgaagcaaggaactgattcccccaaaggagtgtggccctgctgacatgttgatttcagatttctggcctccagaactgtgaaagaatacatttctattgttttaagccactcaatttttggtaagtcaatatagccgctgtaaaaaactaatangctaacaacgaattctgtttcctccatttattcataccttccctaatgtctgcttttccaggtgaagtatctgaaaggtctttttcccttccatgctcttgcccatccttctggaatattctctgtggcagttatgcagacctttacaaccacatttcttgtgggttgtatgtgtgaaatcttcagagctcagaaaaaaaaaatctgatcaaaagcaacatttgaactactgaatttctttcttttcaagttcattcattcaatattatttgttgaataaatattcagcaaatatttattgagcatgtactatgtgccaggcattgttctgcatgctggagaagcctggggaagtgaggggaaagatgaacaaaaatccctgctcccattaagttttcataggcaagcaatacataaaataaagaggtaaagttatagcatgttggatgtagtaaaaagaaactacagagaattaagaaagaaagagggatagggaatagttttctggtttaataggatgattatggaagacttcaccgagaaggtgacctccagaaaggagatatatcagtcagagttcccccgagaaattgaaccaataggagatattcacccttacatatgtatgtgtatgtgtatgagatttattgcaagggaattggttcatgtgattatggaggctggcaagtccaaaatctgcagagcagatgtcccagtttgagttcaaaagccacaggctgctggtcagcacagtggctcacacctgtaatcccagcacttcaggaagccaaggcggccagatcacttgaagtcaggagttcaagactagcctggccaacatggtgaaaccccatctctattaaaaatacaaaaattagctgggtgtggtggtgcatgcctgtcatcccagctactcgggaggctgagacaggagaattgcttgaacctgggaggcagaggttgcagtgagccaagtccgcgccactgcactccagcctgggcgatagactctgcctcagaaaaaaaaaaaaaaaaaaaaaaaaaaaccacaggctgctgtagaataaaaaagaaccaatgtcttagttcagaggccatcaggcaggagaattctttcttactcaggggaatgttaacctttgttctattcagaccttcaactggttggatgaggccctcccacattagggagggtaatctgctttgctcaggctactgatttaaatgctaatctcatccaaaaacaccctcacagaaacattcagaataatgattgaccaaatatctgcgcactctgtgtcccagcaaattgacacataaaattaaccataacaggagaggagttgagtgagccataagggatctgtgggaagagtaaaatttctaggaagagtaaatttcaaaagctaagggcctggcttgttgaacaatgaggcagcaagtgcaagagggactgagagccacaggagatgagtagcagatgaattcggagtgcccttgaggtgaggctggtagcaggcttgatagaccatggacatggctttttgtctgcttttggttattttgttagacctatttcagggtctccaccnttgtcacattctttcctttttaagagtattttttttttctggttatacccatgaaaccttattttaagtccctaaccacaggctttagagatctatgctgtataaaaagtaattcatccaattctattatgacttatatatagcaatctactcatttatgaaacaaagaattccaggcatatcttgttttactagcctgtcctgagtattgtggttcgaattcatttgtggactcttgagtagggctgtctgtctataatgacaatgcatatacatgtagaaccagcttatgagagtttatgttttataaactgcataatagatttaaaagtttctccatacatatttcatgattcccacctcagagggcacaggaaatggtccaaagcagacgactctaacttaaaatgactgacaaggcatctgggtcagtgagctttggctgcataacaaaccacttcaaaacttagtgacttgaaaacaaatcactgttgagacaataaccatgttactgctcacaagtctatgggtcagctgaacctttctgctgctttgccttgggcttcattgatcccagctggtcttaggcaggtatctgtgttcagctagcagatcaactgaagtctggctagttgaggatggtcttacctacctggctggcagctgactggctggcagttgggacagcaggagtgacggggccctgtgtctctcttcttctagcaggctaatcaaagcttgctcaaaagcaggagcatagacttcttaaggcctaggcccaaaactggcatattgtcactttgaccacattttactgtccaaagcaaaccccaataactgcccagattcaagtgggaaagaagtagactttaagtgttaataggaggagctgaaaaataactgtggccattttttcaatctatacataatatgctaattaattgtatgtgttaacttgactggtccacagggtgcccattcacttggtctgagtctgatggcctgagaatgaggagagctgatggggtattacacacacacacatacactattgattctgtctctctggagaaccaagactgatacagatttttgtcccaagagtggttctagaggaagagaatttttaggatgagtttcctgaattggttctgaggtttctggcattggttctctcatctgattaggtttaacgatgctaataactctgtttccattaataaagagggcactgatagatagtccgtggtgtactctgtcaatagagatatataaatattaccattggatactcctaatcaaccacttataagaagcaaagattttggtgactgtgtatatgatgcttttgaacatgattggcaaagtaacaaatgtaaagagattggcttctattgtcatcgaacaaagaatgagctcagggtttgaattcccaggtcaaatgctgcatacatgatctcaaagctgctatgtctgccctcgaggagacctttatctcctatagccttaggactaagatcactgaaaatcaaatgcaggatctcatcctgtgactggctgaaccaacacaatttgaaccctcagcctcacaaggtgtctactgttaaagtcagtgtattaactaggaaggaatgcgttgctcaaagttggaatggagatcagcttcagccccgatgaagctgaggacattgagcccctaaattatgatgagggttctttgccagcagaagagccctctccagcctcttctaaggggattaatcctgcatcaccagaggaaactctaagggcctccctcaaggcagttgccatgcaagatgatgctgattctattcaggacccctctttgtttctagacctgtaactacattcaagtccaaagaggcccctaaaggtgacgtacaaagtgcaactcatgaggatttatgctatactccaaataagtattaagtatttaaattttctaatttataatagaaaagtttggaaaactgtgagggaatgcatattaagaacataggataatggtaggagaaacacaaattagatcaaaatgaatttattgatatggataaaggaagcagacagcatgcatttaattttgcagctcaggcatttggaaagtgctgtaatagtttgtttagtcagttggctgaaacatgggccagaaggtcacccacagtgagcaagttggaaatgctgaacttcccttggtttaatgtagagggagggattaaatgacttagagacattgggatgttagagtgggtttgtcattcaagaatgactcactcacattgggagagtcctggagacatacctttcaccataactgtgggaagtaagtttgtgagggagtcccagcatccttgaagagctctgtgacactctactctgtaggccagaacttacaatggaaactgcagtcactgaattgagaaatctaaatgtaatgggaataattggatcccagggtggcaggggccaagtggcagcactcgaccgtcaaaggcaatgtggccgtgattaccatgatgaacagtggagtcaggcagcaaccaaaattctctaactcacagagaaccatggcactggccagttgatcatggtgttcctggaaagtaaaagagataggctggtgactaaattcttttttgctctctgtaagctgaaaatttctatgtcaaataaaaaaaaaaaaaaaagtattacctgaatcatgaaagcatagagtcactatccttcaaggaattcccatacttgagccagtttatagacccaaaaccctttcaatgaaggggaggctgagtctctttgaggaaagactcctgtatattactgaaaatttatactgttcatctttctcccatccttctccaaatggacctatggtgttttaccaggtgactatgcattggagaaaaggaaataatcagacctgttggagactactgaccactggctctgaactgacacttattccagaaggcccagtatttcactgtggtccaccaggcagagtagggctaatggaggtcaggtgatcaacagagttttaattcaggtccatctcacagtgaagttcatgagtctctaaacttatcccgtggttattttcctagtctgaaatgtatacttggaatagataaattccctgacagaactgctatattggttcttgtgacctgtggagtgagggctattacagagggaaaggccaagtgggagccactagaactgtttcaacctaggaaattcgtaaacgaaaagcagtaccacattcctgaaggatggcagagattagtgctaccatcaagaatttcaaagtcgcagggctggtgagtctcactatactcccattcaacttacttgacgtgcagaaaactggatgatggagagtaacatggnaagtttaaccaggtggtgactccaattgcagctgttgtaccagatgtggtttcattacttgagctattccctggtacttggtatgcagttattgatctggcaaatgcctttatttccatccttgtcaataaggctcgtgagaagcagtttgctttcagctgtcaaggccagcaatacacctacaccgtcctacataaggggcatatcaactctccagccctatgttataatttagttcacagggatcttaattggctttcatcactagtccattacatagatgacattatgctgattggacctagtgagcaagaagtagcaactactctagttttattggcaagacatttgcatgtcagagggtaggagatatatctgacaaagtttagggaccttctacctcagtgaaattcctaggagtccagtggcgtgggacatgttgagatattcttctgaagtgaaggataagatattgcatcttgcccctcctaaatcaaaaaagacggacaatgcctagtgagcttctttcaatttttggaggcaatatattgctcatttgggtgtgttactcccactcatttatttagtgacccaagaagctgctagttttgagtggatcccagaacaagagaaggttttataacaggtccaggctgctatgcaagcagctctgtcacttgggccatatgattcagcagatccagtggtgtctagatttaatattatgtgtcatgtcccaataaagcttggaagtagatcttaacaccattgccatcacccacccacacacatccctacaagtgaagaaacggaaacctcaaagcaggtaagtgactggtcacaaaaatcacaggtaataaagccaggaatcaaacattatcgcagcatgctagaaagcctatctgcttttgatttctcagtcacattattttttagtaattcttaaaaaaaaaaaaaaaaagccttggccaggtgcggtggctcacgccagcactttgggaggccgaggcaggtggatcacctcaggtcaggagtttgagaccaggctggccaacatggcaaagcccggtctctactaaaaatacaaaaattatctgggcgtggtggcacatgcctgtagtcctagctatttgggaggctgaggcaggagaatcgcttgaacccaagagatggaggttgcagtgagccaagatcgcgccactgcactccaacctgggtgacagagagaaactctgtctcagaaaaaaaaaaaaaagcttgtgtggtggactctaacctaatcagggctgatttatatgttgtttttttctcacatattttcctcaatgttctgttcatatcacatagaatcactgagaattcttctctgacattcacagggcccctaagtactgcttcacagactgaactgaagcaatattaatgggtctcntcctagataagcccaagcctcaagcatagccctgcgcctcagtcagccaatctagaaatagggcaagcttctaaagatgaaagggcacagtctctgcttttagtaatctcactagggcaatatagccaagtggaatgaagagatgagacaagggctagactgtgtgacatgggccataggttgacagaagctccaaaaatagagtgagtgctctgaggaagctacacagtagcaagaacatggtgagctgggtggaaaacaatgagttaggtcttgcaggatgcctggcaaaggtgggacgtctgtagagggactggcttgagcaaatggtctcagaacaagctgtggattccctcttttaaagttccagactttcataacttcactttggcctgcatgctttccttttggaggcaatatcttcataaatgccataagaggaaattcaacacagaaccctccactgatttcattttctatttgaatttggcagagacccctttaagaccgaatctcatcaagaaaaatataatctgagctacatattgtactaaatcacttcccccctttttaaatttgaaatcagcttttcttttatatatatttattttgagatggagttttgctcttgtcacccagctggagtgcagtggtgcgatctcagcacactgcaacctctgcctcctgggttcaagtgattctcctgcctcagcctccggagtagctgggattacaggtgcctgccaccacacccaaccaaaatacaaaaatacaaaaaaaatttttgtatttttagtagagatggtgttttaccatgttggccaagctggtctcgaactcctgacctcaggtgatctgcccatcttggcctcccaaagtgctgggattatagctgtgagccactgcacccagccatcagcttttatttcatatgcatgcatagcatcctacaacaataactttaaaaaaaataagtcatcaccattttctatgattgcaacctatatagagaaatagcctggtgttatcctacaagacaatttccttaaaatgtgtgagtaatggctattaaatcattttatggagccatttctaaaataatactctttgtcactgttaccataattacttttagttgtggccatattttaaagaacagaatgctttatcgtgactgttataaatacaaattatttttccccttgtgggaatcatcaggctaatttgtttaccattttccttctaaaacagatcattattaaaaggaaatcagtacaatgattgtgattaagatcaacagctctcttaattctttgttctgttgaatatcaagttttttctgccttcctacctctgtctttccgtaagacaaatccttttgctggcaaggggtatatgtgtgcatgcaactcctgacttatatctccactcttacacntgtgctaattgatcttaaaattaaagtccaggatgccaatgaaggaaataagctctgaaccacgcaggtcacagtttctgttggttgtatttgtgtcagggagctgtcagactctgcagtttgaaatttaagttctcaatggactctgagcgcatatccttgatgtgtgattcacacctgtggtatcatcatggggtcattttattgaaatgttgaacttgtttgcaggggccttaattctttagctttctgcaaaacctagttatgtgatgtgttctctgtttggggataatagagagtaaatggaaataagacattaacattgcccaacccctattatagttggtgttaataatctttgcctataggtttggaagtaccttggcttatataaccactattcagataaaacaaggaaatgatgacatcagtgtaagattgaatgagatttgaccactgcacatgccatgctttg

SEQ ID NO: 17 - DNA, 96500 bp, Homo sapiens
  modified_base (1688)..(1688): n is c or t
  modified_base (23894)..(23894): n is a or g
  modified_base (25426)..(25426): n is g or a
  modified_base (30401)..(30401): n is a or g
  modified_base (51854)..(51854): n is g or t
  modified_base (60461)..(60461): n is c or a
  modified_base (63711)..(63711): n is a or g
  modified_base (64926)..(64926): n is a or g
  modified_base (66316)..(66316): n is t or g
  modified_base (96238)..(96238): n is g or t
gcttgctggtcatcccagacccttgggcaagggcaagacagcagcgtccagcagtcggcttgtgcagggcagccttccaattgcccaaaatatgcgccctcccggacaccatccttggaagagaacctagttccttaccgatcctttcgtgcctcagtccacccagaccaattccagccttggtgaggcgtttccctctgaccaagcacccacccatgggaggcccgtgtcacccggctgcgtttcgcatctctgctcccatgaataaatgtatttactctaaaaacgtgtggctcgtgtgttgtacgtgaaacagccaccagcctcgtgctgagtagccgtaaaatctgtggtgtattgagcggagcgctgcgctgcgtgtcccggcggccctgccaggtaggtggatccagccatccctttccctttggcgggagaggctgggctcgagggacgcccgcggccacagcgctgcgctgcgaagtggcagagcagagatttgattcccgggctcccaggctccacgggcctgccttttccaccttatctccgtgcagcccaagaggcagtcgagctcgagtcttgacgggagaacggagcccttctaaaacccggggatttgaatgcctgcaggatgcgcggtgcgctaggggcggtcacagcttcctccggagcgcccgcctcctagaaggccttgcgcccactagcgggcgccgcggggagatgctctgggcagctcggaaaccacggtggcctcgccgggaaagagagcgcctaacccagggccaggcaccgccacgatttccttcaccctgacacggcccccagcccagccgatacctgtgtgaggccacagctgacctcgattgggctttgagaagttttgtgtcactcaactctggagggaggttgtttctaaaccgagcacatcctaagaattttttccgtgatttcactatgtcctaaaaaatagagctcattttagagtcttggacagggcgggggtttcagaaccgtaggtctgagttctagccctgtgccaataactaaatgaccgggtgttcatccgatcatctgagaaacgtttattgagcacctattacgtgcccaatactgtgctagttactctagcggacaatgagatgaactactcaagatgtggcgttgctcttgagtagttccttgtctagttgggactggggcaaggagatgtgatgccagctgggtagggtaaaggctttaagggaacccatggtgggctgggccaagaaaggcttcctggaggaggtgccgcctgagactcaaaacaagtggtgttagcctggagtgtaggggagcgagccttgacgacagagacacgagcaggtacaaagggcagtgaaaaggtacatggccacgtggccactctgggagcttcaggggttcaggatgctggagtgtggcacgccagagccacactccagccacatgaagacagtcccaccatcctggaggagaaagtcgtgctcctgttggttctgatcatgctcctggctggctgtgaagagtggactgaagccttctggggctgtaagcaggaagtcaaggctgtaggaggctgtcgtggtctggaaagaagaaggagaggcaactattgggtaatggagtgaggatgggagaggtcggtgtgagagattaaagaggagatntggtgctgactgttgtgggagaagagaacagtcagatttccgttgcagtggctgatggatgtccttcacccacactgaggtcaaggaaggaaacacacaactgtgggacgacaacagcgtgcacaactttgaggtcactgagttgaaggagcctatgactctgccaagcagagatgcccaggaagtgtgtgagtctgtgctcaggagaaagcgcagggcagtagagacacattttatgagccaccaccttgtgcacagcagccaatggcatttcactcttacaggggttgcagggagtgagaagaaggccatggacagaaacacagaagaaagacacataaaaaaaatagaatccaagatggggactgaagatttgaaggagcagaagtaatcagagttgagtttcgaaaagattgctctggctaaagaatgcagaatggactggagagggagaagccacaggcatgggccagtcactcaggagggagaacagaatcctcccggggggagaagtctgatgtctgtgtccaagctacttaccttttgcccatctcacaggttcacgtgaggctcacatggggttgtggcaatgacacacacagcatccaagtggaagacaggattgtcctctcatacagaatgacttctccttgaagagcagaggtggcatgttgaccacctctctgttttaaaacatgttgaattagtagccaacatgtaaaattctggagatgttgcatgaaattctgatttctggcttctcttagaaaaaacatgtcttccaacagtcaccctgcattcttggcaggaactgagtagcagttgctctgtttagcagttgctctctttagatggggcactcactttttttttttttctttttagacggagtctcactctgtcgccaggctggagtgcaatggtgtgatcttggctcactgcaacctccacctcctgggttcaagcgattcttctgcctcagccttctgagtagctgggactacgagtgcccgccaccacacctggctaatttttgtttttagtagagacggggtttcatcatgttggccaggctttggtctcgaactcctgacctcaggtgatccgcccacctcggcctcccaaagtgctgggattacaggtgtaagccaccgcgcccggccaggaattcactcttcatcactgtccccaccaccccctagtgcctccttgacactgttagttgccattcaccatcctgtggagcttgtattttctttcgctggtcctgctttactcattttcattacctgttggcatttgtttgtgactcctctaggggtttggggaatacaactgtcttcatgtgagggcttggtagaagtgcctctgtagagccaggtgcagtgactcacatctttaatcccagcattttgggaggccgaggcgggcggatcatgaggtcaggagatcgagaccatcctagctaacatggtgaaaccctgtctctactaaaaatacaaaaattagccgggtgtggtggcatacacctgtagtcccagctacttgggagactgagcaggagaatcgcttgaacccaggaggcggaggttgcagtgagccgagatcgcgccattgccctacagcctgggtggcagagggacactccatctcaaaaaaaaaaaaaaagaagtacctctgtagaatgacaccccaagtaatctgtttactttgcatgcacatcttctcgagccctgcctttcaatctgagccacaggctcttcaaaaatgttcaataattatatttaatatattttaaacaaccacagtttaagaattctaatttaaacaaaaaaagtcacagatacaacaaaatgtgttatcaagcacatttaattcactggcaaccacaagacattgattgtgcccctaggttacgtagaaggccgtagaaatgaactcgccatcgctgtgcgattgaagagtttagcttgatagtgcaaggccggtggctgaaaaaaatgctaccgtttgccctattccttgtcaagactttctcagtactgactcttgaaataaattgacttcttgaagctagcataagactgcaaatggccattgcaactgccatttcaaatttctgaagatgtattagaaacgaagaacccactgccgtcgggggaaagaggacctgggcagatagaaggaaagaatggaagacattttttctcccttggaaaggctttcgccatataactactgcacattttaatatattgacaacactggacatttttccaaaagtaagtaaaaaccttcattgttcaactttataataagccaatgattacttgtggattcattatgataataaagcacttctatggggattttcttttttttatgataggttttgctttagaaaacaattgaaagccacttttctgggaaaaaaaacaaaaaacaaaaaaaaacgctgtttgcggcagccccaattccctaagcattatctggtgggagatgtgttgcagcgagacctcccaccagtaggtggcactgcgcgcaatgctcgcacctcccctcaacaccctttctctcagcaatggcgggtgatggtgggggtcctctctttgcagggctggccattctaatgcctgacctcaggtgcagaccagtgttccgttgcgcgggactcctgacctcgaggaggtttagagaaaacaatggtgttctctgtgtacccttccgcgagggctggggagtataccgccgcgcagaagacgcaggccaggggagaattcgcgccgggcggcaggcggggtggcgggcagcccctgggcgggcggggtcctggcgagaagcgagccggcggcctgaggaggcgactgactgagcagcgcacccggggagcaaggaggcgcggtgaactgagcggcccctgagctgacagatacactgcgcagctggaacggcgagcgagccgacgggcgagtgaggggcgcagccatgatcacctcggccggtgagtgcggcccgtagccagcgcctggagggaggagccgccgccgcgccggcttttagctgagtcagggccggtgactgggcgcctcccggcggaacgccggcctgggcagcttcttgctgcccagggcccacccccgggccggggggctgggagtctgatcaggtcactgcgtgcttctctggcttgagggaatcgagccgggtcgaccgcctcggcatccctccccaatcacaccccagcgccaggacccgaggggcttcctgggccttcccctgaccccagaagggcttaccttttttctgtgcctcccattcttggccgtgtgaggtcgtccagccccagttcttgcccgcagggggccggggtgggatgggcccctgtgccattgaacagtaaggcaaacccccctgatcgggcagcctaactgctacagaagtgtttctggacgtggccgagctccattcgccttagaatgaaacccgaaattaggtttgaggtgggtcatttctgggtccgatccaagggtgttcattcaaaacacccagagaacttttgggttcggcgaagaccctaaagacgccctggagatacctttatactgagagcctacttataccctttcgaggttatgtgctcagtctgttgactgtacattcaagaaagaatggatggatctgcggagcaggtttcatacgcgcaaaccattgcataggtagattcacgtagtgacatttgcaatggagtaagttacagagatcaagtttcaattggagacttaagctccccgttacagattgacttgcatatagctgtccagagccttggtgcttttttccgttgcctatttacatacccttttctcattttcttactctgtgtttgacccacaaagaaagcattttattgtaaacaaactggtgagcagaagacagtaatctgaatggtaaggcgatcaaaactttatttttatgaggattggttaaggagatcgttggagatactgggagacgtagttactttcaaacatttgaagagctgtcacttgtacctgaaataagactttttgtccccaagagatacaagtgatcgcgagatgaattttagttcagtatcaggaagtttttccagtcagagctttgtaaagatcaaataaacactcagtttcttgccacctataggcctcattctatttcaaatccatccattaccaatgtttcttctaactcggcccaaaccaccttcatctcttgtctgggttactatatcagccttaaggctttgttttcgaccattacctccgtacagcccgtttttcttgtggactatgctttttaaaactttaatcacataatacttctttgcttacaatccaccagtgcttacattgtgtttagagcagccgtgtccaaccctttgaattcgaggactttttttcttactgtggtggtcggacatcgtgaaaattatatacaaacctttttttttttttttaagctcattagctatcattagtgttagtgtattttatgtatgccccaagatacttcttccattgtggcccaggggagccaaaaggttggacacccctggcatacagtaaaatccagactcttaaccaaggacccacatgatctgattcccgccttgtcttgtagtactgtcttcactcaatacatcctaatcacactggactttttgttccttggatatgtcagtttctctcctatctcggggccctggcacattctgttcctttctagtcttctcttcctcagattttcccttagcttctcaatcttttgtctcaactcaaatgttatccttccctgatcattctattaaaacacgcttactctccctccaccacagctctgtaattgccttgtttgtttacttgcctgatcactgtctctctctctctctctggtagaattttgagcaggaagcttgttttcacaattctagaatactgctgagagcatggcagaaattcaaaagtatgtcttgactgaagagctcagtcagccagtcaaagcaattaatcagtcccttgagtttttaaagtagaggcggaaaaagcacttggtgacaatataatagactttaagcctctttaaggtggcaaaactaataatttttgaggtcctatcctgagattctgtgatgatcatatagtgtatatttattactgccatttaagtttattggattacttgtcaacttctgttccaaatcttttgtcactttgttttctgtcctatggctcatgttggcttagaatttgtcccaggtgctaaacaggctagtctcatggttctggtgtggattagtcagtttgttcattcatttattgaccaggcagttgctaggcatcaccatacagtggtgaataagaggtcaacatgttctattagttttttccaagaggtttgactatgcaggggaatggagagagagagagaggtgcttccaggcgggagatgtgaaattgagtgggttggtgttttcttttttaaacataatacagacacataaaggaaagttgtgctaaaaagctttaaaacaatagtcccccacctcactttccctttcctgatccccagaggcaggtattcccaacttttaagctgtgtcttctggaacatacctccgtatttgtaaataaatatccaaatatttctgtcaattgattcaacagttttagaccaatatctgctcagttcctataacggcataagaggcttttagcatccttaggcctttcccattctctcccctctccagaagagagttctgttttgtttttaagatgggaaatactaatgtatggagtgtagagtatttgatttagttctggtccatggccagaggctgagtttccaagccaggacaaccatgtaaccagttagtcataagtgaaaccaaaccagagaatataaaaatccatctccctttttggtaaaagccgttcaaatacattgactgaggataggtagcagttttagtattaagtgttctgttatttaagatctgttctacatttaaagcattctggcctgtcatcttactccacatcactagtttgcaattttttctttttcactgattgaattttgaaatttatctgttccctgtgctgtccattcagaatctctgttctggacttgtcataccaacctagagtaccaagaggttctttatatctgcttttatgctactttagttttgcttggtaaattttgtatcttttcctgtgtggcttcctaaagattgcttaagctatttggcaaacctatacttgtcaattagaaatggctacatctaactaagttgccttgacactttttaatcaaaccacagtttcaactcggtgttctggaatgattttaaaacccacatggaaagcatttgagagtggtttcctttgtggtcttagtacaataatttcccatatcatttttccaataatccctttgacctttgactatatttcaaggtgtgttcttttggagaggacaattattccttttactctcctatgttagtggtaataccttgaggctaagagaagccatatggagaacactgtgcttgggtaattgaattcagaatgagtatgattgttcatcatttggtaaaacccaggttacttgtgataggaaagaggtgccataatatacacaccttgaaataattgaagtattttaccttgttgatttgatgactaaatgctcccatttttgtaaataatcttataactgttgatttattttgtatgaataattttattctaaaattgtataggaaagtttcccattttaatcagtaaattaggccaatggttctcaaactatagagagcaaaagaatcacagtactgggccccatcctcataatttgtgattcagtaggtctggaatggggccgagaatgtgtatttctaacaggttcccaggcaatgctgttagtccagggaacacactgaaaaccattgaattaggcaaatgatgtaatatatgtggtgccatgagggtttgataatatagttaagtcttaaacttgagatataaacctttacactttcaaagaaaaataatcattcccctggagaagttacgcctcaaaaaaattgtttttcagccatcatgtatttttgaccaggtgttaatttccactttagtgagaatgtgtttcataatcatgttacatcttttttctcatagctggaattatttctcttctggatgaagatgaaccacagcttaaggtatgaattgaagaataagtaactaggcttagtgtgaatactgtgaagccttttgaatttagtgatatctgtaatcttccatcatttaaagttgctgtcctagctggcttgtacccagttactgtaacctagccagagaggacagtattttggccacagcagttggtttcccttgagtttaacaaagctaagacaaataaacctcgttacgacacttgaatagccccctaatttctttcttttttttctttttttaatcttttttcttttttgagacagagtctcgctttatcacccaggctagagtgcagtgtgtggtcatggttcactgcagccttgacctcctacactcaaatgatcctcccacctcagcctcccaagtagctaggactgtaggcatgcaccaccacactcagctaatttttaaattttttgttgtgatggggtctcactgtgttgtccaggttgatctcaaactcctgctcctgggctcaagtgatccccccgccttgacctcccaaagtactgggattacgggtctgagccaccacaccttccgcttcccccgccccagtttcattatcaacagaaaacacaaaaagttgttgcttctgtttcacatatttaaagttttttatttgatgaaaatttggaatgtccttctggtggctctagatacttgattcctttacatctaaaccagcaacctggagttaattgtttatattcaaagaagaaaaatgttgatgattgaaaacagaaaagaaatgtgtaaactcaagaaaaagtgtaagttggtaaatttttatatttgtcatagagtaaaagtttgagtaaatattactgaggatttgatcattgatttgctgaaaagaattttttaaggaagtgtaatgataagtctatctcaaaataggattttggttatcttttacaggaatttgcactacacaaattgaatgcagttgttaatgacttctgggcagaaatttccgagtccgtagacaaaatgtaagaaattatttttataaatcagaataagatggatcaaatttaattgtgaatgtgggtcttgtggcttattgattcatttagaaatttgctgttaactgaattgtggcttgaatatttagatttgggatttttagggaaaaccacagtttgaactagacctgtacttcctaatttctttcagagaggttttatacgaagatgaaggtttccggagtcggcagtttgcagccttagtggcatctaaagtattttatcacctgggggcttttgaggagtctctgaattatgctcttggagcaggggacctcttcaatgtcaatgataactctgaatatgtggaaactattataggtaattatcgtctatctggtaaggctttatcttgtcggcttctttcttgctgtagtgcacatagaagcttttttcctgaatttgatgttgccaaatttcattttaattggaagttcctaatctttctataataattttatgcaggctgagtttttagatctgcccttcaactgagtgctggttctcagtggttatgatgatcaccagtccagtgagcctactgttagaggaaaagattaaatcagattagtatgagtaacaagtggtaccagtttgtgtagttttttcgaatacaggaaaccattatttagtatctgcattgtgctaggcaccgtgctagtcactctgcataccatggtttattccacagctaccccatgaggaaggagctagccgttttacagatgagacaacttggattttgagatgataaagacatggttattaaatagaaggataaaatttaaaacctggttttactcactctaaaacccatactgtttctatttgtaaccgttgttttcttacttgtttccttatttttgaaggaaggggataacacacaggcaaggctttgaattttctgacacatatttcaaccagagttgtaaattcaactagttatgtaagatttgatacaaagattttatagtgtaaaaaaatgcttgaaaactgttgatgtagtaaatgaaagaagggactgcatacccttcagacatgtgtttatcagactttggattcatagtacagagagctcaagggcatgttctgtcaggagtgtgcagtgcagatatttcacattgctgattagtagaaggtctgtattattcacttgaacacttacaaggaggaagttggtattctcttttagaaattgggaagtcctgcacaagggggttgatagaggtaccatcaactgtccttgggattctgtgttcatgtttttaaagtttttgctatgatgatgtgaaaattttgcaagttactttattgctgttggaggctcattgaattgagctgtcatctgtgaatccagtgggaagaactgatggcttaaaaggatggaccgtattatttgaaactagactactttcttcactttaagctagaagcagggggtgaaataccttacttatctcttttatttgatggatttttttttttttgaaaacagggcaggatctcactgtgttgaccagggtggtctcaaactcctggcctcaagcagttctcctgctttggcctcccaaagtgttggaattaacaggcgtgagccaccacagccagccttttttttttctttaatgaaggtttatggttttttacaacagtgatctacaaatgcttaaaatgccaccattgtacaaattgtgcttttaaactggactgttggtatgaagtgctatggcatggtagatgccttctaaacactgtatcattttacctttggaaggtgagttttgatcagtagaccagttctgtttgcatttatttatttaaaagtggggttcacccttcctctagttttgtagggcacattttttaagatgtcagtgagattcatgagggggtatacaaaacagaatttgggtaaggcttcctagcgtcttaatgaatatcgtaaacagtacctccagaaaatccaggactcataaatctccaagttatgacaaggctttagcaggaaatgaggctgagttttagttataacataaacctgggatatatttatgacatatatgcaaacctggtgaatgagaacatgaatctcatttgaaacctgggacatacatttttccccttcagttatataatctaaggaaaattccccaaatgttctaattttgaggttcctctctgatggggtaggggtaatgtttcctcacttagctacagttggttcaaaaagctcacattagggcctggtggacattttcaacaactggaattctttaaggtctattttgcattataacatccactgtgtttttttgtttgtctgtttgttttttggcagtttttctctgttgcccgggctggagtgcaatggcacgatcttggctcgctgcaacctccacctccctggttcaagtgattctcgtgcctcagcctcccaagtagctgggatgacaggtgcacactaccacacctggctaatttttgtgttgtagaaatggggttttgccatgttggccaggctggtcttaaactcctggcctcaagtgatccacttgcctcggcttcccaagattttgggattacagatgtgagccactgacccaacccactatgttcttattaactgtacctgaaccttcatggttccagctgaatcttgaatgtagtatattccaatttataaaagtcctctgcttccttcaagatatagacccatttaacccgggtcatctagtaggccaacaatcatttatgctagttaaaattatttttatttcttggggctatggtttgtaactaataaatcttgccctcgtcttcttacttatctttgaaagggaaagaaacaagccaatgaattatggagaggataattaatgtatatgtcattcctcttgggtgactgggttttttgtttttttgttttttttgtttttttgtttttttgttttttgttttgagacagtctcgctctgtctcccaggctggagtgcagtggcgcgatctcggctcactggaacctccacctcccgggttcacgccattctcctgcctcagcctcccgagtagctgggactacaggcgcccgccaccacacccggctaatttttttttttttgtatttttagtagagacggggtttcaccgtgttagccaggatgatctcgatctcctgacctcgtgatccacccgcctcggcctcccaaagtgctgggattacaggcgtgggccaccgcgcccggccagggtgactgttttatcttccttatgaaggtggaaggcttagggaaatgtccttcttttggttgtacttagaaagtttaaggtgtgattgcaaagatataactaaattgcaaacaaatgtttcttatcaggtgtgctattgatatccttcagtatgtcacaccctcccctccatgcacccaaatcattgtgaaatatggaagctaaattgggcacaaacacttttgcatgaattttcagacaccttcttgggagaaataggttccacctacctcacattgagacaataaatagagtcaggaatcacataatgacagactgcatagacaacagatgtcccataagagtacaataccatatttttactgtaccttttctgtgtttagacacaaatgctattgcctatagtattcaatacactaatatgctatacaggtttgcagcctagaagcactaggccataccatagagcctaggtatgtagtaggttatataacatctaggtttgtgtaagttcactccatgatgtttgcacaatgatgaaatcacctaaagatgtgttttccagaatgtattactgtcattaagcgacacaggactgtttttcaaaggatctgctacagttgctggaaaagtttttggaaatctttggaactgccttttaaacttgtggcacatttcaagtcatttccccattaccctacagagacaatttagacatagttcttactctcaggttgctaatagtttcattaatgcaaagaagtccgatatactactatgtgataattgctataataggccttttaaaatatcttcagtaatggcaaatgtttgttttttgaaagtgaagcagcagctatttgtagccagttcttttgaataagcagcttaatcgggtagagtaataaaattttgatcaaaatggagtaacaagatagaaactttaaaaataaattaaataagagacagggtcccattgtggtgctcaggctggcgttgaactcctgggctcatgtgatcctcctgcctcagcctgccgagtagctgggactgtgggtgagcactaccacacctggcagatagaaatgttttgaataatgtcaactggattggaattaatgtgtagttctccggtgtaaatattatgggagaacagtattcaaatgcataagttctagcatttcaaaatttgcttattgctttatagtcatcccataagtatatatgattataaatataggcattgccctttctgatagtttagcccaatttacaagataatcagttattttatttcctcaacagcaaaatgcattgatcactacaccaaacaatgtgtggaaaatgcagatttgcctgaaggagaaaaaaaaccaattgaccagagattggaaggcatcgtaaataaaatgttccagcgatgtctagatgatcacaagtataaacaggctattggcattgctctggagacacgaagactggacgtctttgaaaagaccatactggagtcggtaggtagatgatgttattttagaaattattgttgatagggaatcagcaaagcaagttattcaaactgaaactttcataggcagtgaaaagaaaatctagtttagaaatagcaggtgatcttttgccaaatattttattttcatatttatgtatgaaccttggttgtgttttgtgttcatgaaatatctgcttttatcttaccacataatcctttgaagtcttgcatggggaagttgtattaattactctgccctttttaagaagacaataaactatattttaatgcatttattagggttaaaactactcagctagattcctggtttgcggtgtttgcaataattaagacaatttaagtcaccaaccgaagtggtcagaaaggtacaaagctgagtaaaatggacattgatctgcaggcttactttgcctcaccagctatttctttccatgagctagctctctgtacactagccattttggtatcttctcatctagatgaaccctgcctcgttcccccttccaaaaatattttttacatttcttttttctttcttttttttttgagatggagtctcgctctgtcaaccaggctggagtgcggtggcgcaatcttggctcactgaaacctctgcctccggggttcaagcaatcctcccatctcagcttcctgaatagctgggattacaggcgtgtgccaccacacccagctaatttttgtatttttagtagagttggggtttcatcatgttgaccaagctggtctcaaactcctgacctcaagtgatccacccgtctcagccgcccaaagtgctgggattataggcatgagccaccacacctgccctccattcctttctttgcctgctttatttctcctcacaatccaaaacttagctcaactatcccttgtttgcagaactttgatcccaatacccatgccttcctcagcccctaagcaaagactaggtccagttctgttgttaatcttatggagccctgtacattttttcatggtgtttatcccttgataattgtattagtagatagttaatagctgtctttcccactagatcataagctatatcgggacaggtatttgtgcctttttcaccactgtatccccaaaacctaacacagtgtttagcgtcgataatacgatttgtttaaatgagtgaatgaatgaatggcctaatgtgatataatggcccttgtttccctctcaatttcatttttgtgcagttttagcccatccttgtcttcgtgtgtgtaagattacatttttggctttcatttattcaacaaatattttttcagtgcttactgtttgccagatactgttctaggcattggagatgtgcattgtccccattcatccatggttttgctctctgtggtttcagttacctgcagtcaactacagactgaaaatattaaatagaaaattccggaaataaacaattcatgtcttaaattgtgcaccattctgactagcacaacgaaatctctcaccatctctttccatcccgcatgggatgtgaatcatcctagtagatctatgctgtgtacactgcctattagtcactttagtggccaccttgcttatcagattgactgtcgcaatatcacagtgcttgtgttcagataacccttattctactcagtaatggcctcaaagtacaaaaatagtgatgttggcaatttagatatgctaaagagaagccttaaactgcttcctttaattgaaaaagtgaaaattcccaacttaataaggaaagaaaaaaaattgtgctgaggctgcgctgagatgtacataagaatgaatcttccatccataaaattgtgaagaagaaaacagaaatttgtgcataatttatatagagtttggtactgtttgtggtttcaggcatctgctgggggtgctggaacatagtcctctcagataaaggagcacctactatagtagcaaacaagaccaacaaagttcctgcccaaagcaaacacttcattggggaatctagaaggagaacaagcagtcaaacaaataaatatataaagtaaaagaatgaaaaatgttttaaaaaaaaaaaagcagagtaacaaatgcatctttctttgtatcccagtgcacatatacatatagatgtaatttaagctttatgaaactaatacctactcttactacttgtgatataactctgttatttttaaattgtattttttatttttttaatttgctagtcacacttcattaaattgattttattacgcagtggaaagtcacaactcactttttgagaaacactcctgtagctttcagtgtgctaatttatgttgaaggccttttacagggtgaagtctcaaatattggggatacttttgagaatcaccaagtaaacacatagagcctggatcaaagttttcttgtagggagagcaccagacagatgtggcagtactcaatgcttgagtcactgagagctgtgttgtgtttcctggccagcaagtgagtgtaggcagtaagtcatgagggagtctagtagcaagataagaagcagaaagacttcagcagacacatttggaaaacatagctacttagtgtatggacagttgtatatcttttataataattaacagcatcactttattatagtatactatgttcatgtaatagtgattctgagtaccactaaatattatttttaatccattttttatgatgatgtggaaatatgtaattcttttaagattttcatctaaaatggtttaaaattcttgagtttgtattgcttaagaggtctaaataattggcttcctagattggctaaagaagcaagattaaaataattcaatttctaaataaatataatgctgcaataaccagataacgttatatctttaaactatctctttcagaatgatgtcccaggaatgttagcttatagccttaagctctgcatgtctttaatgcagaataaacagtttcggaataaagtactaagagttctagttaaaatctacatgaacttggagaaacctgatttcatcaatgtttgtcaggtaatgacattaaattatgtttcattacattgctccacgctgtactgtgctatgctataccacttcacattttattactttatattactataatggctttatacatgtatctcagctgatcttcacagcagccctgtgaaaataaggtatgtgctttatattcctttttattaataagaaactaaatctcacaacactaaaaagctattttgttgtaacacattctttctttgtattcttttttcattttgaaaatccaataatttaaggaaatttttagaaataacgaaggttttttaaaaagctagaagattaaaacagtgcctatgctatactatatcattctaaagagaattcaaagtgtataaattatatatggtttcattacccatacacaccaaaacatttgggtatcttttctttatctctttctatatataaatttgcttgcacataaaaaaaaattcagatggtacagaaaatatataaaatgaaaagtaaggcttctctttcccatcatttgggctttttcccaaaggtaagacatagatgtttttccctacttattcacacatgtggatctactgcattcttttaatgactgtattgtattttattgactggaggtgtgcatgggtttactttttaacaattgctatgttgtatacattttttgtattctgctcagggcatagcattttattgcacattttattgtttcttcattaaaatgtgctcctgtgtattttaatcctctagactttgaaaatttagattaaaacactgttttttacaatcccttttaaagcaagtttgaaacaaaatactagaagaaaaaatatccatgtttaaatcacccaaagtcaacttactattctaacttgattttttacatcacccaaagtcaatttagtatttaatagtgtatttcctttcagttttctctacataggttttcggagttttgttgtttgtaaatatttttcatagttttttttaaaactgacatgaaaaatagtagttccctgccctcttcctgtctgtatttcagttttattccttagaggcaattttatttctttcagctgttttattccttatctttttattatttttaaaaactttattgctcatttttaaaataatatatttttgagcagataatatgttcatgtgatttaaaattcaaaaagaatgatggggtatacaatgaagtcttcctattacttggctccagctaccaagttcttttctctgtggataaacagtgttaattgtatacagtctttaacatttttccatgttctaattcttcatagagtcctcttacttgattgttgtaatcattcagtgtatgtactttgccctacttaatcattcccctattgttgaccacttattttgtttgtgttatttcgtgttcttaatttataataactttgattaatgtgtttattttgaagttgagttacttgctgcctaagggaacaagaaaatttaaattgagtttttaaaagaaaaattctaactttgttggataattttgttaaaacaatggcagatcataagagtagtaagagaaatgcttcaaaatggtaattttaatgtctcttgtcctggcccaacacaacacaatgtatgttaaatgaatgagtaacttccataatatatggtaagggagaaaataacaaattaaggagcacttaggtataacttatggataagatttaaagaagccaagattcattcaacaaccaatgttgaatactgctgattaccaggcacagcattaagagttataaatataatttgtatgaatttttttatggaagacagatgccatgtttagaaaaatttcatctagtgctgggtttagaaatagagtgctagactggatagtctgccctagtttgcctgtgcttatattttaaggttttctataatgttgattttgtctccttaagtaccttgtagatgaagtttttaattattgaataattgttctttatctccatttcagtgcttaattttcttagatgatcctcaggctgtgagtgatatcttagagaaactggtaaaggaagacaacctcctgatggcatatcagatttgttttgatttgtatgaaagtgctagccagcagtttttgtcatctgtaatccagaatcttcgaactgttggcacccctattgcttctgtgcctggatccactaatacgggtactgttccgggatcagagaaagacaggtataagtacctttttctgcatcaaaactaattgaataatctttatttcattttggggacaggtagaatatttataggaagcatattctaagaataaattttgccactagctttcatagattgtaaagtcttattaggctgttgctctgttttgtactgtgctgggtgtagtaaggaaaaccgaagaaattgacccttctggaaagaaatagaagtgattatctcgtagggagggcctaccagacaacatgtgtactatttaatcaagtaaatttaaaaaaacaggtggggataggttggggctaccttttagatatttgggttagatatatctgggttagatatttagaaagtaaagaacattctcagctttttatgcttttattagaactaaatacacaaatttctatagtattagaaatttgcattctgtacaaattgatatggtattaaaattttatttttctgtattttacacgtttagatcacttactaaaaacatttgtgtgtcttagttgtgcctgtatatgccggcagccccctagcccgctctttcactggatatctgtgtctgagaaatgtgggactctctctttcacttaagcactcagaggccattgtagggttattaattggcctaatttcaatattgttgtgtctcagggaatagggagtcccaaggagaaggagagagatgggggaatgaccggtgtgtggagcagtcagaacacacacatttattgattgagtttgctgttttatatgggtgtggttcgtggtgtcccaaaacaactacaatggtaacatcaaagatcactgatgacagattaccataacagatataacgataattaaaaagttttaaatattgcaaggataactaaaatgtaacacaaggacaaagtgatcacatactattggagaagtggctccaatagacttccttgaagggcagtaaaacaaaggtatgcctatatttttctttatatcactacctctttccttattactaaaactatgctaagtcttgcagtcaggtattgtaagacctacaattttgattcttttttctttttcaagattctttgggctattgtagattttttgcattatataagtctgtgggtgttctgattgggattgtattgaatatcttcaatttggggcacattgaaatcccgataatattgaatcttgtaatccaggaatatggtgatctttttcatttacttaggttttttatttttttctcagtagtgttttgtagattcagtgcagaggttttacacatcttttcttaaattaatgttcttatatccctaagtataatttgttttttgatgctgttgtgaagtggtatttttaaatttctattttttttgttggtagtatatagaaatataattgatttttatatactaacattgaatcctatgaccttgataaaatcatttatagctttataaatgatttttttaagtaaattttttaaagtagatccttttacagaattctgtttattggcatcttggtcatctgcagttagagagcattttactccttcttttgtaatctttataccttttccctctcttttttttctatattggctagaattcccaatacttacagaagtgataagaggcagtgaaaaaaatctttaatttttttcaatcttagggggatagaattttttatttattttcgagacagagtctcagtcttgtcacctagtctgtagtacagtggcacgatctcagctcactgcatcctccaccttcctgggttcaagcaattctcctgcctcagcctcctgagtagctggggctacaggcgcaggctatcatgcccggctaatttttatattgttagtagagacggagtttcaccatattggccaggctggtctcgaactcctgacctcaggtgatccgcttgcctcagcctcccaaacttctgggattacgggtgtgagccaccatacccggcctatttatttatttttgatttaacaagttttctttcttcttgccttctccttttcttaaggcttatgtgtggtggttacaagttccttctgagttaatcttcatttctgaaattattattttttctcttttatttctgattttctctagttctatcatgttaatttctgagtttttgtacttctaatatgtaatagtcttgtatattttatgtaattttcctaatttctcttgttttgaaataacttttttctaatattttatgagattttactttgatgcttttctgtagcttatttttactgaaattagtttttctaaacttttccaaaggaggcttgtttaggatagtttttccaattttactgccctccagtatttcctcttctgttgcatttatgtagtactatacaaaataatggcttttgttttgggatctcctgactctgtttcctttctccattgcccaggctagggtgcagtggtgcgatcatagctcactgcaacctcaaactcctaggctcaagcaatcttcccacttcagcctccggagtagctgggactacaggcacgcaccactatacctagttcattatttaaatttttttgtggagacaagggtctcattttgttgcccaggcttattggtaccttctttatctttgtccctgcctttttaatttggattctctgcccagcactttttcctcaatatggtgctttgacctacaagggactgttggctgattagatttaagagtagttggggtcccagccccttcttttcaagcccattttgtagctggtggtgattttgctttacctgactgtgttttgtgaatgaaggagatattttgtcgcctgttcttgttgtatttgttgtccatggttttgctaacctagttgctttgtttttattatttggaggaaatttaataactggattgcctccatcttagagatgtgtagaattttttatttcttaatggtaatactttagtaaacattattttcttgcaaaatattcaatttggacatggttcagatctgtggtataaacaaattgtacttctcttcagaaaaaattattggttcttttcatttcagtgactcgatggaaacagaagaaaagacaagcagtgcatttgtaggaaagacaccagaagccgtgagtgtgctttttttttttcctttgagacagggtcctgatctgtcacccaggctagaacgcagtggcgcggtctcggctcactacaacctctgcctcccaggctcaagctttcctcccaccttagcctcccaagtaaatggctgggattgcaggcatgtaccaccacgcctggctaagttttgtattttttgtagagacagggttcgctgtgttgcccaggctggtcatgaactcctgagctcaagcaatccgtttgccttggcctcccagagtgctgggattacaggcatgagccaccgagccaagccaccatgcccagcgagtgtgctttttgaagttgagattgttacttaataaatatttccacaggatattgtaaattctttcaagtatatattctatacatgcttttattaaagtttactgttaagtttgataccaaagtcattttataaaaatgaattttctgtaaagattaaagttttaaaaattgatccgaagaaaacatttagaagaaatcaaatccttagatccttacttcaggcagaagttatttctgtctgaaataacttcaaattacctatcacagggtgaaaaaaaggtatggtctctagcaaatggcaacatatatgggagggaggctaattgtttttgttgtttttaatgtttgcngcgtattggaagggtagggtaaatattacaacagtggtctgttggacttttggttcctgatgctcaggtgtgtaaacttcagctgttcttcacctggttggaaagttgtgttggtggcatggtagtttataagatcaaggctgggcactgtggttcatgcatgtaatcccagcactttgggaggccaaggtgggtggatcacctgaggtcaggagttcgaaactagcctggccaacatggcaaaaccccgtctctactaaaaatacaaaaattagctgagcgtggtggcacacgcctttaatcccaggtactcgggagaattgcttgagcttgggaagtggaggttgcagtgagccaagattgcaccactgcaccccagctggggcaacagagagaaactctgcctcaaaaaaaaaaaatcatatatatatgttgattaaaggtattttcagttttctcagtttcaagtaggaagtttctcaattaaaatataaattgactcatttaataaaaagtaattttcctgcgtgttatcagtaattattctttcccagtttttaaaaaatatttaaatattttacatcgaaagctagctggggatgaattgtattcttccatcaagctagtatcatatctcagtagcatctaataaagaaagaaataaattatcctttctcttaaaatggactgaatttcactggtttaggactgatgaaataaaattgggttactggattatagtaatactgtttatgagttttcattttttttttgtttgttttggcagagtccagagcctaaggaccagactttgaaaatgattaaaattttaagtggtgaaatggctattgagttacatctgcagttcttaatacgaaacaataatacagacctcatgattctaaaaaacacaaaggtaagaaattcatcaataatagaggattttaaaaaatatttagttctttgttgcatataagtaattatatttatttcttgttggatactttctttattttatttccaattaaggaaaaagtatttaagttttgaaaaaatagcaatcaattatcctcttggagttgttggaaaggaagaaaatgagcaatgattgagctcttgtttttatgcttatctcttattggggagcttagttaactcatttttcatttttaatgtatacatggagcagttagacaaatagcacaatcagaatattaagataggctcttgagccgcttgcttcagcctgctccaaactctgtggagtgtactttcatttcaataaatctgtgtttttcttttattacaaaaaaaaaagaatataggttttgtgtctgtatttcccattgaactatgatctccttgagagcagcgattcttaccttgttgcagtgtttgttgagatattgctcttaacagttattaatactgattttaattttttagcaagtaatatatttgattcaaaatattttaatataaaaagatatataacatgaaaaatcttccttctcgctctcttatttatccantaccccttcgcaaagtcatttttttatagccatatattattgaatgattaaacagttgtttgattaaagcatgtgtaataatgctctttgaaacttttaatacaatttttgcaaatggcaaaaaatatggagaatcatatagtctccattcatgacaatttaaagctagtctttgtaatatagtctcattaaaaataaacaaaatttgaccaggcacgatggcttacgcctataatcccagcactctgggaggccgaggcaggcggatcacctgaggtcaggagttcaagaccagcttggccaacatggtgaaaccccgtctctacttaaaatacaaaaattagccgggcatggtggtacatacctgtaatcccagctactcgcgagactgaggcaggagaatcgcttgaacccaggaggtggaggctgcagtgagccgagatcgtaccactgcactccagcctgggcaaccaagcaacactctgtctcaaaaaccaaaaataaacaaaattatctggtaactgtcagaggtgcagcactgctcctcaggttatctcaacaccttggagaccttgggcaagatggagaagagaaaaagcaagtttaattaaaccaaagaatagaaaatctgctgtccaaattccccacttaaaatctgttgttgagctctgttaaaactgcaaataaaactttgacttgcttgtttgtataaactagctatttagtctttataaaagaaatacccaagatccatattttaaatctcagttcagtttgttcatgcttttaccacaaaataggacctctgactgtgtgtgtgagggtgtgcatatatgaatactttgccagtgatgaaacaattctgtatttgttgttgcaggatgcagtacggaattctgtatgtcatactgcaaccgttatagcaaactcttttatgcactgtgggacaaccagtgaccagtttcttaggtaaatatgcttgttgattttcactttggttcaaaatctttttcttttttttttttttttttttttttgtgcagtcttactctgtggcccaggccggagggcagtgatgcgatctcggctcactgcaacttccatctcctgggttcaggcgattctcctgcctcagcctcccaagtagctgggattacaggcgcacgccactatgcctggctaatttttatatttttagtagagacaggcttttgccatgttggccaggctggtcttgaactcctgacttcaggtgatctgcccacctcggcctcccaaagtgccaggattacagacgtgagccaccgcacccggcctaaaatcctttttaacagacactgtgttaacattgttgtagagatgttgaggactttccttgttaaccagtccttaattctaaattatatttttgctattttatgtattttttgttgtgtatttctacttgttttaaggtaaaattaattccttttattacttggcttgattataggctcttgaaggaaatatattaagctctaaaattttatataattttgtttttatttatagtagaattacgtatcgtgcattttaaaaatccttaaaatactaagaacaacttaagagttaaaatagaatcagtagtaacttgagatccacaaagtaatttggaagggttcaaggtaaaattttaatgcttttaaccttagagttaaaaagctttaaggaattcatttgttttaacactaattaaaatacatcatctttttttacagagataatttggaatggttagccagagccactaactgggcaaaatttactgctacagccagtttgggtgtaattcataaggtaatatatattggtcagtgtatacaggcatcagaaaagaagtaatttttctggggttaagaaaaaataacagtttattataattcattaacaagtacactttgttaagtcagataagtcattttgtggagaaggctaaagtaaataagatactgaagtatttatatgtgtgtttgtttttaataaaaagtggaaatttgtttctataaagactgtgtaagccattgaaaggataaattgaaatgttatttgcatagtctgagatggatttgggcaaatgttataaaacaaagggaaaaaattgaagcatttgtgattttttttttttctaaccagagtgtaactgggtctctttaaaggcttgtcctcttgtttgagttatacaattatatgagagagagccccactacctccttctctcttagcaagtgaacattctggggaaaaggcagtaatcatagaaaacattgtcttttttcttcttactttctctttttgatgtctttgttatgacttacctttacagggtcatgaaaaagaagcattacagttaatggcaacataccttcccaaggatacttctccaggatcagcctatcaggaaggtggaggtctctatgcactaggtcttattcatgccaatcatggtggtgatataattgactatctgcttaatcagcttaagaacgccagcaatgatgtaagtattaaaatggaaaactaaatttccaaaactcaagaatccaggataacatatttgccacattattttagtgactggagattttgtagaatttgcgaatacccaaaacaactgtcatcttggattttttttttttaggtaatttcatttccttcttgataagctaaaattgtgtttctcactcctttaaaccctgcgtgtatttgtaaaacatgttgttttcccacactttcatcttaaaatgttacaactacaagtgaccttagttatcatctagtctaggccctaacattttactggaaattaaggcctaaagaagttgcagtctctcagaagttagaatccttgcttgttttgatctttgataattgtttaaaatgtaaatcttttggaaaagcttactaagtagccctgttcttattttaaggaaccttaaaatgtaattttacactaacttctatattggagtgagggccatcaggagagtagttaagtgagccagaaaaccttgccctcatgcataagtgaaaagattgaagccagggctgggcacggtggctcacgcctgtaattccagcactttggaaggccgaggcgggtggatcacctgaagtgaggagtttgagaccagcctggccaacatggtgaaaccccatctctactaaaaatacaaaaaattagccgggcatggtggtgggcacctgtaatcccagctactctggaggctgaggcaggagaatcacttgaacccgggaggcagaggttgcagtgaggccaagatggtgccactgcactccagcctgggcgacaagacagaaactctgtctaaaaaaaaaaaaaaaaaaaaaagattgaagccaataggatgatgtctcaattaataagccccttagccacaaatcgtgtgtgcaggtacacacatttttaccttatttcccctggtctcaggtaaaaactttcttatcagatagggtttatggttacaaaaaaacaaaacaaaacaaaacaaaaacagcaatagacagcattaaaaaccatttctaactaacttgaataagaagtttattggaaatagcttatataattaatagaaaggctgatgaactagttctcacaaaggttaaagagccagagcaacaccacagatgctagataacaggaactaatgaaatagccttttcaggaccctaccttcaggatgaatgaacttgaaacatttttggccattgggttattccacttaaagatgaaaatcgcaaagaaggagcattgtattgctctggcttgggtcacactttggctaggggaaggtgggagattcttaaatgacagtcccaccaggactctaaccagtggggaggagtattaccaaaggaatgttgggatgctgtcactaatagaagcatgctgtgcattcagaaatgacagatgaccactaaagtttcctctttcaaatgtgtatatttcagaggtactctgacctcattttcaaccactttcttcacaaccatgttccattagatacctttttctcctctgtctttagcctctcactctgtactgcctcctttccctcaacccatgaacatactctcatctatcctaaacaaaattcttttcttgacatctccctcttagttgttcagtctttttcctccccttctcatgtaaacctactgaaagagagttgtcctctctgcccactttgttttctcacgttcatttcacaactcactatttttaatttattatcattattttttgagacagtttcttgctgtgctacccaggctggagtgcagtggcacaatgatggctcactgcagcttcagcttcctgggctcaggccgttctcccacctcagcctcccgagtagctgggatcacaggcatgcaccaccacgcccagctaatttatgtttatttttttgtacagaccgagtctccctatgttgcccaggctggtctcaaacttctgggctcaagtgatcttcccacctcagcctcctaaagtgccgggattacaagcatgagccaccagtccagcctcagctcactattttttggcatcagcaaatatcattctattaaaaatgaaattgctgggctggacacggtggctcacacctataatcccagaactttgggaggccaaggtgggtggatcacctgaggtcaggaagttacagaccagcctggccaacatgatgaaaccccatctctactaaaaatacaaaaattaggcaggcgtggtggcagccacctgtaatcccagctacttgagaggctaaggcaggagaatcacttgaacccaggaggtggagtttgcagtgagcccagatcacgccattgcactccagcctgggcgacaagagcgaaactacgtctgaaacaaaaactgcaattgctgagtttatcactgaccttttgattatcncatcctttgatcattcttactgagccaacctctgcatatttaatgtgaaactgtattttgaaattagaataaaaacttgtatgttaagtacagtgtaccaaatcaatggaatctatgttttttccttagatcgttagacacggtggcagtctgggccttggtttggcagccatgggaactgcacgtcaagatgtttatgatttgctaaaaacaaacctttatcaggatgatgcagtaacaggtaagcatttctttctaaagctaacaagcttaagtattaattaatgtaaatgtaattacattagtttctacctatattttgtagcctcttaaaattccgatggatttctctagttgaagaggaagtgaattttgctccatttgtcaaagttatcttttaaaacaagttttgtgatatataggctttctaaaatggtatatcctgtgtgtccactttcataactgacttttgcaaacaggaatttattagggtgatctgcttactccatactgcttggcgataatatagaaaaaatgttatctaaatgtctcctttgaaatcactgtaggatttgatggtacattctgtcaaagtttaaaaggaaaacaaccctaaatatgaatgtgcgaaccctaaatgtatgaatgtgcttccacataaagtatcctttttaccaggtggtttaaaaaaatgctatcagaagctaatgatttttttgatagtttatgcaaaaagagtgctactttcagttggatgttttactgactttaaaaacataactctctgttaacattttactcgttacttgccaggggaagcagctggcctggccctaggtttggttatgttgggctctaaaaatgctcaggctattgaggacatggttggttatgcacaagaaactcaacatgagaagattctgcgtggtcttgcagttggcatagctttagtaatgtatgggaggatggaagaggctgatgctctcattgaatctctctgtcgtgacaaggtgagatcacatacgtccctcactgtccatttatctccagcatgtaaaaaacacttaacttcactggaaattaactctgttcccatcagaacatgtaggtacacttattcataaaacttctggcaatgtatatgaagcctaatagaatttaagaaataaaagcactgattagaaaaggtacatgggagtaatttgaggattttaaattttgctatagcttcagatcggtgatactcataagcagattcagcatagttctttaggaattcacgagttgatttcttttagaaataataatttttgggccaggcgtggtggctcacgcctgtaatcctagcattttgggaggccgaggcaggtggatcacttgaggtcaggagttcaaaactagcctggccaacatggtgaaaccctgtctctgctaaacgtagaaaaaaaattagccaggcttggtggcggacacctgtaatcccagctacttgggagcctgaggcatgagaattgcttgagcctgggagacagaggttatagtgagcagggattgaaccactgcactccagcctgggtgacagagcaagactccatctcaaaaatatatatatatatatttttggaatgatttgatagtcatttaataagatacaaagtttacttcattattcttttatcagaaaacagtaccaatctctatacttgtttatttgggtgaggttttttttccattgccttttgtttagtttttataatggtgttgtatatggtgggtagttagtggcaggtaatactgtcctctataatcaataagaaccactgctatagtttattgataaaattattaattaatttgttcagttaccaggctccatctttcttccactcagcactcagtacccaggaatttaaataaggtaaaaatgtagaattagaagccaacttccttgcttgattgttaaaaggaagtggactgccataggagtggctgttgctgttgacttgactttatacttcctaaaaagtatgaagcagggcaggcatattgcatagcgtattgggaattaagagcagctacctccttctgtatttatgtgttttattgccccatttatttcaaaaactaccaaccacaaaagagttattgagctcatcatttcctatctgagaccagcttacttggtggatgccactatgcctattagactgtagaagttaactgtttgaaataagttgatgattaatgttaaattatttttcttaggacccaattcttcgaaggtctggaatgtatactgtagccatggcttattgtggctctggtaacaacaaagcaattcgacgcctgctacatgttgctgtaagtactctgacctttcttgggaatggggtggacggaaaagcttgcagatggacaataagtgtctaggtgactccagcatccacagcgcatgaccaccaccagtggtcttaggttgtgattctcatttactggacccaacaggccataacctagcactagattcacttagcttttcagaaggatatgggatgggataacagtcccatataaatggaagtccttaaagccattcaggtgcaacttctaaaatcctactgcaaggagcaccctcatttgtaagggataagaccttgtgagtatgtgtggccaccctaggatagagaaattcagtgaagaacaggaaccatttatttctttttacagccggtagagttagcttccacatacccctaatgggtgcagtggctcatgcctgtaatcccagctactctggaaagtgaagtggacagtgagctataattatgccaccgcactctagcctgtgcgacagggcaagaccctatctctaaaaaacaagcaaacaatcccccacccccacaccccgggacccctaaggaacatgatctattacaagagatgcactgcacaggaaagccaatgcacatgttttccaaaaggctttccactcatagttctcctaatccaaatgtagttatcagcaataagtaatattgcctggtcacacagtggacattccacgtgtcttaataggtttttatcatcgtggtgctgggaaaaggtaaaccaagggtacctttctatgcagaaagacttagaactattgttaactcctttttcccagagataatattttccacagtatttattaataattaataaataatttttttagcagtgcagtatgttctaaatgttcatattttgcaaaagccataatgcagctgaaatagtctttttctttttttttttttagcgactttgagacagggtttcgctctatcatccaggctggagcgcagtagcacaatcacagctcattgcagcctcaaactactgggctcaagtgatcctcctcctacctcagcttcccatgtagctagaactacaggcacacaccaccgtgcctgcctaattttttaactttttgtgtagacagggtctcgctgtgttgcctaggcagatctcgaactcctgggctcaagcaatcctcctgttttggcctctcaaaagtgctaggattacaggtgtgagccactgtgtctggccagttgaaatggtcttaagaagtagccctggggccgggcatggtggcgtacaccagtaatcccagcactttgggaggcagtggtgggcagatcacctctggtcaggagtttaagactagcatgtccaacgtggtgaaaccccatctccacaaaaaatagaaaaattagctgggcatggtggcacacgcctgtagtcccagctacttgggagcctgcagcaggagaaacacttgaacccgggaggcagaggttgcagtgagccaagattgtgccactgcactccagcctgggtgacagagtgagactctgtcttaaaaagaaaaagagagagaaaagtaaccctgaatcttaaactttgtcaagctgtgaagacttctaagcccctgaattgaaatttttcaataactttttctaaactggggacagaaatttattcttcaaaaatacatgtggccaggtgcagtggcttatgcctgtaatcccagcactttgtgaggccaaggtgggaggatctcctgagccccagaagtttgagaccagactgggcaacatagggagaccctgtctctataaaaataaaaataaaaatacatgtgtctattttttgaatgtattcatttattgtatatgtttagaggtgtgcaacataatgttttgatatacctatcagtagtgaggtatacactcactgttgaatgatgctgacctctcatgtcagtttggtctagtggtagactacatagtataatataatcttaaacttttccccctaggtaagtgatgttaatgatgatgtcaggagggcagcagtagaatcacttgggttcattctattcaggtaataacttcaaacttcttattctatttatatttcattttttttggaaatgtagtagtcactaccgaaactaccaaacagtttagtcactaaacaaaaactaaatacctgaggagtatatctgggttcagagtgaggaccatttaatagcgagattagtactgttcatctgaaaaagaacaaagcatatcatgggattctgagaacctcttttagaagtagttatttctgttcattttttggtagcattctgcttattcatttaactttttaaatccaaataacacatccagtactcctcttcttgtatattggtagttcaaatggatattatctcttacacaggtttgtaaagtttttgaagggctttaatgaaagtgaaaggtaataggttttgtttaaatgccagagtgaaaatttttaaagattatcttttacttatagtcatggagatgtccttggcagtatgatatagttgtgtttaagaagtcatactcttggctgggcgcggtagctcatgcctgtaatcccagcactttgggaggccgaggaaggcggatcacgaagtcaggagttcgagatcaccctgactaacacggtgaaaccctgtctctactaaaaatacaaaaaattagccacgtgtggtggcacgcacctgtaatctcagctactcgggaggctgaggcaggagaatcgcttgaatctgggaggcagaagttgcagtgagccgagatcgcgccactgcactccagcctggggtgacagagtgagactccctctcaaaaaaaaaaaaagaagtcacactctaaacccatctgcctgggttgactcctgactcagcttcttactagctgaatgactttcagcaagttgctcaacctctttgcgcctcagtttccttgtctttaaaatgagtataatcataatacccatctgagaagatgtttttgacaagtgaattaatatatatatgcaatgcccttagagtggtgtctggtactagtaagaactaagtgtgtattaataatggtaattgtagtagttgtagttgtggagttggtggtagtattaatagatgtaatagtagttcttccagtaattcattactgtctacttagattcaatctcagacatcagtgtttctcttagctaagatacaagcataccttgttttactgcactttgctttattaagctttgcagatactgcatttgtttaaaaattgaaggtttgtgacaagcctgcatcaagcaagtctaccaaaaccatttttctaacaatgtgtgctcatttcatttctctgtgtcacattttggtaatcctcacaatattccagactttttcgttattttatctgttatggtaatctgtcatcagtgatttttgatgttaccatcgtagttgttttgggacaccacgaaccacacccatgtaaaacagcaaactcaatcaataaatgtgtgttctgactgctccacacaccgatcattcctccatctctctccctcttcttgggactccctattccctgagacacaataatattgaaattaggccagttaataaccctacatggcctctgagtgcttaagtgaaagagagagtcccacatttctcactttaaatcaaaaactagaaatgataaagcttagtgaggaagacatgtcgaaagccaagatagaccaaaggtaggcctcttgcatcacagatagccaagttgtgaatgcaaagaaaaagttcttggagaaaattaacagtgctactccagtggacacgcaaatgataaggaagtgcaacagccttattgctgataaggaaaaagttgtagtgctccggagagaagatcaaagcagccacaaccttcccttaagccaaagcccaatacagagcaagacgttaactcttcagttctggaaaggctgagagaggtgaggaagctgcagaagaaaagcttgaagctagcagagagcttggttcatgaagtttggggaaagaagctgtctccataacatggaggtgcaaggagaggcaacaagtgctgatgcagaagctgcagcaagttacccagaagatctagctaagatcattgatgaaggtggctatcctaaacaacagattttccatgtagacagaatagccttctatttgaagaagatgccatctaggactttcatagcctagagaggagaagtcaattcctggtttcacagcttcagaggacaggctgttcttgtcagaagctaatgcagtgggtgactttaagttgaagccaatgctcttgtatcattctgaaaatgctggggcccttaagaattatgctaaagctgttctacgtgttctagaaatgaaacaacaaagcctggatgacagcatgtattagtcagggttccctagagggacagaattaataggatatatatatatatatatatgggagtttattaagtattaacttaaacaatcacaaggtcccacaataggctgtctgcaagcttaaggagcaaggagagccagtttgagtctcaaaactgaagaacttggagtccaatgtttgaaggcaggaagcatccagcacaggagaaggatgtaggctggaggctaatccagtctctccttttcacgtttttctgcctgctttatattccctgagagctgattagattatgcccactcagattaagggtggatctgccttccccagcccactgactccaatgttaatctcctttggcagcgccctcacagacatacccaggatcaatacttttcatccttcaatccagtcaagttgacactcagtattaaccatcacacagcacatctgtttatgtggtatgctaaatatttgaagcccactgttgagaattactggtcagaaaaaagattcttttcaaaatattactgctcatagacaatgcacttggtcccccatgggttctgatggagttgtacaaggagattaatgttatttttatgcctgctaacacaataaccattctgcagcctgtggatcgaggagtaattttttactttcaagtcgtattatttaagtcatttcttaagactatagctgccataggctgggcgtggtggctcacgcctgtaatcccagcactttgggaagccaacgcggcagatcacccaagatcaggagtttgagaccagcctggctgacatggtgaaaccctgtctgcggtgaaaccttgtctctactaaaaatacaaaaattagctggacatggtggcaggtgcctgtaatcccagctactcaggaggctgaggcaggaaaatcacttgaacctgggaggcggaggttgcagtgagctgagatcacaccattgcactccatcctgggcgacaaagcaagactccatctcaaaaaaataaataataaataaaaaagactagctgccataaaacgtgattcctctgatggctctgggcaaagtaaattgaataccttctggaaagcagtcaccattccagatgccataagaacattcatgattcacaggaggaagtcaaaatatcaacattagcagcagtctagaagaagttgattccatccctcatggataactttgaggggttcaaggctttagtggaagaaggaattgcagaattggtgaaaataacaagagaactagaactagaaatggagtctgaagatgtgactgataaaacatcaatggctgaggagttgtttcttgggatgagcaaagaaagtagtttcttcatttggaatctactcctgaagatgctgtcgacattgttgaaatgttaggtgtaggaaaaaataaaaaagaagtaatcactttttgggtctgacctgcagaccctggccgagtgatagatgaaagaagttctcagacatggatatccagtgaaggagtgggctagggggctgctggcactagggccgaagagagttagccgcctctataagccagagatgctcgtgtttatttagtacagatttaatgagaaaggcttggagcaaacacaatttgtgggtaattaacattgtcgacccaccaaatagagagcagtcctgcacacgaatgatcacagattagtttctggagacaagagtaaacaagtttatctagataagttcctttacattcccttgttatgtaacccttgctcttaagagaatttaactgccttcagctaaatcctcttgaagcttttgcaaaacctcccggccttccaataaggtttgcatctttccctataatttttataacttttcccaccaccctgactgatctcctacatctcctccttccttttctgctttttacatcaggttttgttaattgaagagtacagatgtgtgcagcagcagatttgttaggcatagtggttataactcgttttccagctttgcatcctagaattagtaaatagcataagacaaacatgagtataatcagtaacattcttttccaacaagaattgacccccaggagtgggggtctatccaggagagatgttatctcacatccttccatatggctgtttgttgggcgtgtagatctacggtgtttagggattctagaattttagttttaagttgtcttaagtctgctgttaaattatcatataaggttccccaggggtgttgtttcacctcatcccaactatgtattggttgattccaaggtagggaggtgacacagatacacttatgctcccagtcacagtttaagtgctgtcggaatgccagcgcatcttgctgctcccctgtatattctaaggcagcctcaggggcttgcaggcgtgcaagaatcttttgatctgtaccctgctctaagagaagttcattagacacatttttggccaagttacctacaaaggtagctgtttttacagattcagtaatagaggccacagcaatactagcagttgctaagatgactatggctgagactataaaggttttataagtgtgcctatgaatcttttgggtctgacctgggacggggcatgttctcaggtggcaagagcagaggaaccttgccaatcacgtgtcaaattggtgggaatgcttcagattgtctccttaataccatgatactagtaatatttaaattagatataattagtgacgcatgaggcaaaccaaacctgtccctgcactcgggtcacaaacgtggagttttggggtgtaatggaaatattggttcccataaggaaaacatatggatgggtagtgcaaatcaggcactgatctgtgtgattatgaataaaggtcacagtatagttgttactggaattatggtatgtcccataccaggtgtaaagggagatgctaagatgtcccaggcaccataaagtgtcttggggtggcatggactctccttgggatctgggatatcccgtccctccatcggcccaaattgtacgggaatgagacgtggctgcaaaactgtgattgatgccacgatggatgaggacatcagtatggttgctctgcaagtgtcagtgggggctctagtctaagatgttataatagcctaaatggagtctacgggcttgtcctccatgacagacctcccagccaaagtggaatccattactttcctggctatgttctttagcacaggaaggaatgttggggaaagtggcgttggttgcattgcccggtttgaggctatctgcaaccaagaatgttaaggcatttcctttgccatgatatagccatacttgagtttgggcaggtacacagtaaggattggaacttttataactaatgcacagtgggaggatagtggagtgatatatagtgttacctggcatcttaatccaatgtgtgccattaatgagggaccccactgggggtaagtcaatccctcctagccaagcagttatgttattagaggttgggaagggggtgtctgcccaagtaacagggcaaaagaaaagcagatctaagccaagcaattatgttattagaggttgggaagcgggtgtctgctcaagtaacagggcaaaagaaaagcagatctaagagatgagcccaatagagagtagcaggtgcaggttgcaggcagagtgagagattaagaagggttaataccctatgagagttgcagtgtacaacagaaggcatagcaaggaacaaattatgtggagtgaatggtgtctgtgtctggagcaggattcgctcagcctcctgagttgtcttcttcagcatcccccaggtaaagtccggggcttgtgtcatcctaggaagccgcgtcgtccggggctgctggtcctgcagggacatttccttcatttctggtaccaggttgggtcctagccacaccatggtatgatttgatgtatcgtgctagaatccagagaggacctgagggggtgtgaacacaagcatatcctctttcccatgtaagcaaatcatttggaccacaccatacattactatttacatttttccattaaactgcaggttttatgtcttgagaggttttagcaaagtgcttttctatggctgaaatttatcatctaaattttaaaaattaagggtaaataaggcttgtgccagtagtgttgccaggttcttacccatattcccccttttttgtttttttgagcatatttttaagagtggaatgggtatgttctactgtccttgggggttatacgagatgcctgtggaatgttggatgttccacgtgtgacaaaattgttgaaattgtgagctggcataagccagaccattatcagttttaatttttgtgggccgccctataaatgcaaaagttaagagtagatgtttaataatatattgggtggactctccaggaaaagtatgtgcactaattaactgagaattggcatcaatggatacatgtacatatctttgttttctaaatttaggatgtgagtaacatctgtttgccataactgattaggttctagtcctctagggttaacacctgttggaggggcggtgccgtcctctagggttaacacgtgttgaaggaggggaggtgcctgtgagctggcaatctgggcattgcaggataatttctttagctagcctttgggtgagtttaaattgtttagttaaattactccaattttggtggaaaaattgatgcaattgggtggcttggtcaagcagtgacgtcataacttgcatatctgcttgttcattgccataagccaatgggccaggcagtgagctgtgggctccaatatgtgtgattagaaataggatgtgtacgttgatccagcaattgctgaagtcaaagaaaaagtgcacacagggtgggctcgagaatggacttgagggctgtttcaaggttctgcaataaataaacagagtaagcagggtcactaacaatattgatgggctgagcagaaaaagtttccagtgccagtattaaggctccagccttagctgtctgagtgctagtaaatccagaatgagtaagggaattatgtggtttctaccaaattgccacttttccatttttaccagaaccgtcagtaaaaagcattaaagcgttgggtatgggggagtgaactacttttataggcacaactacagaagtatgagataagaactgaattaagtttgtcagcaggaagggcatgctctatatggcctgtataatcagaaagtgctatttgcaggtctagagataagggcaatactgctttgaattgctttttacttgaaggaattctatgacatcagggtcataacctagtgactgattgcattgtctgcagcttgtatagttgactttattaactagctggatatagggagatagtgttttagtccaggtatgtgagcaaaaaatccattccaggaagcgtagccctggggccatttgtcctattaaccctgtcgggagtgtttagtaggaaaaacaaacaattgaactgaataatttgggtctatgcgatttagttgcctctgagaaatagcttgctctatttcctcaattcccctttttgctgcaggagttaaatacctgggagagtctggggctgtattgccctttaggatggaaaacaggttttgcagcttatcagtagtcatgcccaaggtgggacgaagccaattaatattgcccaataatttttgataatcatttaaggtgtataagttgctagtatttaatttaaccttttgaagtcttattgaccaggaaattagcatgtatccaagatatttccaaggagaggacatttgcacatttttaggtgctatgtttaaacctcttagctgtgtattctttatgacagaggcatataaacttaaatgcctttgttggggctgctagtaaatatcatccataaaatgaataatcttgcaagtaggaacttcttttctactggggagcaaagcttgattgacatgatactgacacatggtaggactatttagcatcccttgaggaaacactttccaatgaaatcagctagctgacctttcattattgatagctggtatggtaaatgcaaatttttctctgtcctgttctgcaaggggaatagtataaaagcggtcttttaagtcaataacggctaaaggccaatcttgaggaatcgctgcgggggaagggaggccctgttgaggccccatgggttgcaaattagcattaatagcctgtaagtcatgcagaagtctccatttgccagaccttttgggaatgacgaaaatgggtgaattccgagggctgtttgacaattctatatggccagcttttaattgctcctcaactaattcatgggctctttgtaatttctttccctttaaaggccactgttctacccaagttggatcttgagagagccatgttaagggtaggggaggaataataacagtggccattattagaaagaggtctgcagagtgacctcaaacctcttgtaaatgggctagcggctccgttctttctaatgctttttcttatctctttataagctttaaaataaatgggttcatgtacctgattgccttgttgatcttgcattaccaggcaggctaagagctccccttctaatgctgcttgcctaagacagaatcccatagctgtaggatatcccttgtcttttttccaatttattggaggaggggactcaggcaaaacctccatttcctttttgttatttttttctgttaatggcggggctgagggagatggagtcggtaaggtaggtgatggttcctcttccctaccctttttaggcacttctgtgtatagcaggaccaaagcagccctgactaaggcccataacattagagatgttactgggacccattgcccttctgcatgatgttgtttaagatttctcccaactggtttccagagctctatgtctaatgtaccttcttcggggaaccacgggttatgggaaacaactgttacatataaagtttcggtgccacaaaagaaatagcacttgaatataaaattttctttttaattctcagcaaggcaagttacttctatagaagggtgcgcccttacagatggagcagtggtgagcgcacacttggacaagggaggggaaagcgttcttatccctgatgcacgtggcccctgctgctgtgtcatttccctattggctagggttagaccgcacaggctaaactaattctgattggctaacttaaagagaatgacggggtgagcgctttggcgggagtcagggcagagcaggtagcaggtaattggaatgagttagggtggagcagatgatcggaatgagtcagggtggagtaggaaatcgaaaaaggttgctttatgaggaagttaagtttaaaagtagaaggcaaagaattgaacatactgacatattctttgaaaacaaatttagaactcatatctaacaatccctccccttgtatttccttacagctttcttttcaaacttttttacaagtcttggcttagttgttttgcttgattttccaaaagaagaagcttctctggataagatggaggatagttggtggaggttttagtaagtgctgtttttatgagcctctgcatcaacttacagatgcatggtatgacacagcacccaacaagaataattacctattacggcagtgagggaaataagaattgaggctattattcctttccatttactgaactacttttctagccatcctgtaaaggggtcatttacccttgagttgctggctaactcattggatagagcagtcagaccttgcagtgcctttgttatacttccattaggaacagtgttgtttgggataaaggtgcaacattgagttttaatcatgacacaaactcctgctctttctgctaataaataagatagcctaaggctatcttattttcccaagccatctgactagtagcccctaattgttcagctattcctttaacagcatctctagtgtagttaataaatcgctgctggttgtaatagatgtagtttatacagtctacatttttattgtcacccaccaaaatattgactcaaatcctgcagctatttgattttgggttttaaattgatctagtattccctgtgggactctaattgtgtctaaatagacgtgagagtcgaaagacccatagggggcttctcttgctttacagtgtcttatttttccttcctctggttgatgaaatgccagggtgaaagggatagccaattggactaaagcacaagtgcactccagttatttggcagagtgtccagcaaaggtccaccacaataccaccacacatctgcttggggatgaacaagggctgactgattgataacctgttgaaaattcttaagctcactgcatcccttcaggtctccaaggaatgctaagtttcctccctgtcgtgagagacatgaattgaacttagtgttgggagacggaagctggatggccctcgggggctgacccgcagggtgccggactgctttcttctgctagcaaagcagttgccactacagattaaatgcatttgggccatccacgggttactgggttaaggatttttgataggaaagctacaggttgtaagtggcttcagtgctttctggctacacccttgtttacactgacaacaaggtggtattggagtgttatagggtcacggagaagaccttcaattatcaattataggtttttaatttatcctggcttttaaaggaatagggtacactgttttctctttactacttctatctctctctctctttgagtttctgttctctctctttctctgtctctgactccctctttgtctctctgtctctttctctctctctctgtctctttctctctctctctgtctctatctctctgactccctctttttctgtctcttcttctctttctctctctgcctctctttcccctttctcttctctctctctctctctctctcccctctctgctgttctttccctgcctctgccagccacttatgctgctgttctcccctctccttccacttcctctaggggagggaccagcgggagtagagcttctctttcttcctctgaaaagaggatgcccaagatggacattaactcgacccaagtatacaactgaggtcctaagaattggtcaatttggtctgccattccgtaaaggtcatccagtagcagtttaagcacctttttaaaattctggatttctgaactggttaggggagcatttacaaagccaatggcccccccttccttgtggtacctctttcaaaggaaagaaagtcggggctgatctcttaggtacagagggaaatgggaaattctgaatatcttttttacattgttctacttcacactggagtccttttagagaggggtatttaggttgggagggaacaggctgatgggatggtaattcctaagagtcagggttataacgaggaaggataacgttgagtagagagggaatttggaatgggatctgaggcagcagtggctgtctgagcggaaagattggggacactgaacggggttagatagtctaagggatcccatgcgctggaatttttaggcatgagagctggctcctctgacttttcattttgaggtaccagattgggttcttccctatttgtttttaaaggaaaaaggagggcaggtctttgcctccaataaagggcatagcctagttcttcctgagacactggacttttaccattaacatatcggattagaagctgacacgttacatcctcattcgacccaaagtttggtcagaagattgagggtttgaaggtgggtccctgagtccaaataaaacagcaatattgttatcatttgttgctttttcctaagtttagtcctttcgttatccttccagtgttttagcatgagacctagggagatatccagggggatgtctttgttaccatctttatctcccttgctccctgtcttgcttggggtatttcccatcttgatggttttggggtaaggttcaaggttcaatttcccttactggaaatttctcaccttttggggtgaggctcaatttccccactggaaatgtcttgccttttggggtgtgaggctcagtttccccactggaaatctctgccttttctgctactggaggtttgtgtgaggttcaatcccccgaaatggggatggctcgcctctttttaacctctaagccaccccgaccaaggagtagttcactgcccccctcccccttgcggctttcttaccttggtcctgaccaccaaggaaatactttaccggctcccacggcttctccttccttggtctgtgcacagagtcatcgctgcagtatgtgaagatcctttaagctaggttgctggccagttttttattttttatttttttctgcgttgctgagagctcgggttattcctcgcactgggtgggtcttgatttctcacccctgaggccaccacaagggggcagggcaagcctcctcacgagagagaaccagagaccatcccgggaggggaatgcaatcatgggcgagcccccaaattgttacatataaagtttcgatgctacaaaaggaataccactcaaatataaaatttttttttaattctcagcaaggcaagttacttctatagaagagtgtgcccttaaagatggtgcaatggtgaacacacacttggacaagggaggggaaggggttcttatccctgacgcacatggcccctgctgctgtgtcattcccctgttggcaagggttagacgcacaggctaaactaattctgattggctaatttaaagagaatgatggggtgagtgctttggcaggagtcagggcagagcaggtagcaggtaattggaatgagttagggtggaccaggtgatcagaatgagttagggtggagcaggtcattggaatgagtcagcatggagcaggtaattggaatgagttagggtggagtaggtaatcaaaaaaggttcctttatgaggaagttaagtttaaaagtagaaggcaaagaattgaacatactgacatattaattatttggaaagaaatttagaactcatatctaacacaacagtttgcattaggtcccttaattgagcctgcaaaaccaaggctccgctagctttaagcagctgtttcaatacttttatatactgttgccattgagctgataactgttgtcccatgatgaaaccctagcctgaacaatcccctcgaacttggaaatccacagtgggcaccaatgacttactgactgcgcagtttcttcaccttcattttcgagggttccctcgcaatctgttgcagcgttcctcacgcgggggcaccacctgccgagtctgtcctgcagattctggccaagcaatggatgaaagaagttctcagacatggatatccagtgaaagagcaggctagggggttgccggcactaggggctgaagagagttagccaccccgataaaccagagatgcttgcatttgtttagcacagatttaatgagaaaggcttggagcaaacacaatttgtgggtaattaacattgttcacccccaagtagagagcagtcctgcacacgagtgatcaaaggttagtgtctggagacaggaataaacaaatttatctagataagttcctttacattcccttgttatctaacccttgctcttaagagaatttaactgcctttagctaaatcctcttttgaagcttttgcaaaacctcccggccttccagaaaggtttgcatctttccctataatttttataacttttcccaccaccctgaccggtctcctacaatcacttccaagattaggctgtagaaaaaaattaatgaaaagaaacatagttgaaattacaacaaagaattgggaatatttagtaaagttagttgatagagtagcagcagagttaagagaggattgactacacttttgaaagaaattctgttgtgggtagaatagcatcaaacagcatcttatgctacagagaaatcttttgtgaaaggaaaagctaatgtggcagacttcattgtcttgtttaaagaaattgccacacccaccccagctttcagcaaccaccaccctgatcagtcagaagccaccaacatcaggagaagacattctaccagcataaagatgaatatgcactgagggctcagatggtcggtggcactttttagctataaaggttgttgggttgtttgttttttaaatacagagggtcttcctctgctgcccaggctggagtgcagtggtgtgatcattgctcagaggcaaacctgagcttatggagcttgggttgaggcaaaactgtagaatagcagagactacaggcactcaccaccatgcctggctaattttggtttgtttgttttgcaaagacagtgtctcactgtgttgcccaggctcatcttgacctctggccttaggagatcctcctgtttccacctcccaaagtgctgggattacaggcatgagccacccattgggtctggctatgttttttaactgaggtatatacatttttttggacataatgatgttgcacacttaataggctatagtatagtgtaaacataacttttatatgccctgggaaaccaaaaagttcgtgtgactcactttactgctatactctctttattgtagtagtctagaaccaaacccacaataccttgaggtattttattaaagaataaagttaaaatacagttgacccttgaacaatacgggagttagcatcactgaccccacaactcttacactgtcgaaaattcacgtataacttttgactcccccaaaacttagctactcatagcctattattgatcagaagccttatggataacatacatagtcaattaacatataatttttatgttatatgtattatatactatattcttacagtaaggtaagctagagaaaagaaaatgttattaagaaaatcataaggaagagaaaacactcgtcttcactatgaagtgcaagcggatcatcagaaaggtctttaccccattgtcctcacattgggttggtggaggaggaagaggagaggttggtcttgctgtctcagtggtggaagaggtggaggaggtagaaggggaggcagaagaagtaggtacactcagtgtaatttttagtgaaaaaaaaattgcatattagtgggcccacacagttcaagcccatattgttcaaggctcactgttatatggatactgcctgttatagcttatttgttatatttgttatatttgttatagcttatttattatatttgttatagcttatttgttatgaaattacacagtaagttgctaaagtgcatgttagatgagtcatacgtcttatgtccttttaaactttagaagagattttctaccccaggttccctgggagtgaatctttgttataaaaattgtatgcaaatccaacacataatttcttgaacatccattatgaactaggtacagagtcttctccataatatcccagataggaagtcatccatctacaaactgtaaaatatttttttcctatcgtggatggaaatgttgaataaaacagaacaaaacacagacccatatagcatggtatttcttcttacaccagttttcttgaatatgattgttaatcaaatactggtcttcactgtgttatcctctaactctcattttgccaactttttcataaagactctagacaattttcacaaaatccttatgacataatatttacccaagtctactagtctggcacctctaaacgggttatgtgacttattgggcctgattgtttcttaagttacacttttcatagaagtgtccagtgttcttcgaggcctcttctgagatctggcaaaacctatgtgtattaagctattctgcattttgtcaaaagatctgccacagactccacactttgaacttcttgaaccctatctcttcttttctcttttaaaatattggaatacttcatcatttacattctttttgtactttgcagttttctgtttttcttccaaaatttggtttcataattacatacacaaatttgttctatttctaggaggtgattcatttagctttgtgactggaactcatctaaggcaactagactctttatctgttttgtgtttgatcagtctttctgtctaaaaattattctccttgagagaaaagatggaagcaaaataaaatttaattacttctatttccttcctgttatcttagcatatcatgtagccaagctgtgaccctaacctttccctattcttgctgtagagattagacacaattaaaaaatgagaaaatggtctgtcatggccatccagagtgggttctttgtgtgaattatcagagaactagataattttagtatggaaagtatattcttccaggtatacccttagtatctcttgggttgtgtaaagcatcctactcatgtttgactcttaagttgttttgtttcctgtcagttaatgttttgtattgtcagtgactttatattttataacaatataaatcagtggcttggtgtttatattctgccacataggaagttgacggtcatttaaaactntttttcttccatttttaatctgatggtgctttgctctctagttaacaaaattcatgtctgcccttttatttcctgtagctaacacaggttaagttcccagtttcagcagcagatgtctcccgtgagctgcttaggttttgctgagttttccactacatagtatagtcaaataagttatttatgtgcttgctacttctaagggaccattcttggttctcttttcataaaacgaatctttaagaagtgggaactggaaaaattttgtctaaaatttattttataaatgaaaattaaatataattgacctgtttaaagagctggagttaaaaatcctctctatgttctctaagttttagtttactgccatttccctagagtgagaattttttaaagtagaagaaaccagtattcacattttttttaaagataaggaaattgaattccaaaatgtttaataaatttccccactgtcataaagctaaatactgagattctaaacaggcttcatgatagaccagtgctttctccaccttgctttcagtcagagcaccatctttttgagtggctgtgataaaacagctttattcttaattttccttattaactttaatatttgagaagtgtctgtcctatatcctaagactggtacatgttttctgaagtgacatcatttactgtcgtagcatgctctccatcttttttcccccctttagatttcccttttaaaatgaatttgtggacatttggtcttataccatgttttaagagtttatttcttcataatttttaaaaacttcttttcaagtatacttattggatatgaatactaaaaacatgttagtaaacacatatttgtagttcaacaactaagataaaattgtctttgtgtaaaattcttatgtatattatctcctttattcttaggatagtccagggtgttacagtattttatttcttccttctgatatttgtagattgttatttgttcataatgcttgtaaataaaagtaaaaaattaatttgataactattcttgcttaattgaaatgaacatagtacattaatttttatctaaataaatgttctctagtggaacatctaataaataagtgattgttgggcccattgttagtactttcaaaggcagattttattattataacaacttatgcagtactgttcatgtcattgacttctgaaaactcatttggaagtgagtagaatctgaattattttaacttgacactggaaaggaaaatgaagaaagtcaaaagaattggtctttgtatatctgttgatattaagtttctataatgaacaaattgataatctgatatggacatttcttaaaatcagacagtcttggtggtcccttgcagggtgctatgacttaggctgttataatatggcattaaatgtttctcagtgtataaattcataagcttttagatacggatcttgcaagatgaacaacagattctttgtgcaactgttttttagaccacacaaagtgattccttgaatataaaaatgttacatcatcattgatcctcataatttgaagaaaccctcatagtgaaccagttaccactaacactaacactaacttcatgatcatctttacatctccattcacaattctatatcaatttgatacatattctctgtatactgttctctgtttttgccccagtatctttgtgtttctgtctgggtgcttgacttttccttactttttgtcattttcattttttttttctacatctttgttttcttctctccattaattggcagtaacatggaataaaaaggtttttttttttttttcaaaattattctaaatagttataatctgttccttttcttctaagataagactattaactggagttcttttgttacgtaagggtgtttaactgctgagatttgctttcaaattatacatctctttaaagtattcataaaatggaaataccagttctgcatcgaagtggtaagagtttgtggcttggttgtacttttcagaaatagtcaatagtggagttatgtttcactttctagaatattctggaaatagtagaaaggtctctcattaactatagaaagatctctgggttaattgtaagcaagagctagacatggtgactcacacctgtaatcccagcactttgggaggccaaggcaggcagatagcttggggccaggagtggagaccaggctgaccaacacagcgaaaccccatctgtactgaaaatacaaaagttagccaggtgtgggggcgggcacctgtaatgccagctactcaggaggctgaggcatgagaatcacttgaagtcaggaggcggaggttgcagtgagccaagattgcgccactgcactccagcctgggtaacagagtgagaatctgtctcaaaaaaagaaaaaaaaaattgtaagcaaggaaatttttcttaagggtttgacatgaaacagtttataggtgttgtggctaattctgtaggtgtgcgtatatttaagcacacaaatttggaggcagtacaaagcatgtgagaagatagttcttttgatctagattgttatctatgggtagagttttggcaatgtgattgcctgccaactctggtgtatagatttcctgaaacaattatgtatgccttcagatgcataaaatacagaatttggaatactgtcatagtgataactgaaaacttaatctcaacataccttggcaagaatataaatcttaacatatgccaaatccatcatattagagaccagaaccaaaaaccaaaatagagaatgatttttttttaaggaatgtaaattattttgcctcttatgtgagataaccatccctaatgctgctgaaaaatcttagactagtagtagggaaacatacctaaagctttgatgatttaggaattaaatgtgtatgatatactcttcccagcagattatatatagccagtaaggaatcataacagatcaggatttatgtattagagccgcattctagcaaaggattctgccactgtgaaaatatatgccttgttcacttatacactgagattctccgtagccaatacatttcttaaggcaattatcctaaactgagttgcctgcagaaggacagcaatagagtcataggtcgagggacaaatatgggtgaacctgaaaaggaaaagctaaggtatgagttatcttcactgcagacccccttagtctaaatttgcacttataacaggagcattaaaatatatatcaaaagtagattgaattgtctaccatttacttagtgccttctatgtactcatcctcataagaattgtataaaatgcagatgagaatactggggcttgaagaaattaagtatttttcctaaatttaatcagctgtctggtaagtggcacaggttggactcattctgagatctaacagtgcaaaataatatactgaaaggatgaataaaaaattttgtgctggaagttcacttgagtcactggacaagcatacataggcaggcatgatctcacttaaagtttgtatccctgattaagatcccatgcttgtgcacgttaattaatatctctaagaaacctaatgtggttcaggtacccaagagcgattttatttgctttttcctccttctccaatagacctacctgtgctgagtagaagctcaatatcagtcatttaacaaacaggtctagttccaagttcttgttattttgtgtgatatccagctactatcctccctatcccttccatcaaaacagtttcctgatcagaggaaaattatgactgcattcaactaaatcagactataaatggcaatcttaactcacctccagatgtgatcactgttttgtgcacttatttttagctctgtgttccttttgttctgtatcatgccttatgcttttaagacctggaaggcaaggctaatgtttgttttgttttatttcattcttagcacaactttgcatataattagaaaccaaataaattttatgatgacagtggttctttttaaagcctgaaatttattgatttgactttatttcattcgaataccttaaaatttaaccagagtgctggattgttttcatttgtagctatataaaattattttcctcatggaataatcttgtccaaattaggaaaattagatattcttaatacttacatcttaggttaaagagatgatttgatatatgacataaaattctttatataatatattcttggcacatttacatctcattcatcatcttactcatcattatgtttgatgacaactgccagttctgctatacataactaacttgctcttcagttttgtcaccttcattttcagtgaggagaagcgtatctagtagaatgattgatgaagactgaatggttgaacttcggagcctcattggactctggtacatggcagggttaatcccatttcgaattccatgtttcttgaaaaacttagagttctctgccattggattccggaagtagatcttactggagcgttttctgagagtttttactgactttgtggcccggtaattgcaggtgatatatcggccaaatgcatcccgaaatgtcttattgaagagggtgtagaccaaaggattcactcctgaggaaacatagcctatccacacaaatatctccaggagcatttggagagtagtttggttacaggaatcacataaaactaaagttatatttgtaataaagaagggacaccacataagcaaaaagaggaaaaacacaatccctaggacctttgaggctctctgttcgttggaaatggtctgcactgactttttcccaattgtggatgttcttcgcataagtgtttcatcacctgagttgggcagagccttgtcctttcgagaaccatccagcattgccaccttttccggtgacgagcaaggtgtttcatccctttggaaaactgtagacacagtcaaccatgttaggcgttgaggtggcttgtttttgactaagtaagccttcttctgtaaagcatggatagtgagaaagtaggtgacaatcataattgcaagaggtgtgaagaaggcagccagtgagccaaagagcatgaaatcgccaaaacgttcctttgtcagcacacaagtgatattgtttgggttgtccacatcagtctctatccctttaatagggactggaatggcaatgcctaaggaagaggaaaacaagataaattgagtcattttatgacctgtaactcttcgattagatccttttggattgtatccttataactttatgcttgttggtgcattataattcctgggacccacaatgcaggatttgtcgaagcattcatcagtgaagatttgacaaacagaacctaagtgagcaaatctgtttttaaacggagattggttagtaatttcagatttataatgaaagctcccctaaagctatagtatatccatgatacagtggagaatgtcttcatttattctacatttctcataatctatttttgttttttaagctatctcagattaaggaagagaaattcagaagagaacctgcttttttcttattatccagtgtagttgatctagaggcacttcagagtacatttattcaatatctttactcagttttgtctttgaggttacagtttcatttaacagtttttccttttgatatgtgtgaatgtcttttaatcctttccatctaacttcttagggaaaactaaagttcattaaaaagtgctacttaaaatttgagtgtgtgtgaatcatgatgttgaaagattatgagttcttaatctttcttcttctgtagaagcctgggcacagtggcgctcatgcctgtaattccagcactttgggaggccaagtgggggtggattacttgaggtcaggagtttgagacaagcctggccaacatggcgaaaccccatctctactaaaaatatgaaaattagccaggcatggtggcacgcgcctgtactcccagctactcaggaggctaaggtgggagaatcacttgaacccaggaggccgaggttgcagtgagccgagatcacaccactgccctccacgctcagcgacaaagtaagactctgtctcaaaaaaaaagttcttttatgacctgggaaagaaatatacctcatgttagttttctgatctttaaataccatgaagtatttaaatatgatgtttcttagtgaagtagcttattagaaagacaaataatacaggggttaacctgaatctttttcctttgaaacagcagatattttttaaatgtctgaattaattgatctttagaaacctctggaatccttgtgttgttttgtgaatccaagagcacccctcatctacacaccctttttatggtagctaaagagccattgacaagaatatgttcctcaaaccctttctaacagaggtcattactttctctacttttcctcatgtacaccaccagaaagaggattctgtatacttgttctacaccaggggtcattatactacagtttgaggaccattggcccacattctatttttgtaaaagttttattggcatactgccactcccatttgttagtaacatattgtctgtggctgcttttgttctactgcagcagaatggaggagctgtgacagaaaccatatacgccctgcaagcccaaaatatttgctgtcttaccctttatagaaaaagtttgctgacccctgctttaccctgttactttcagatcaccattccactgtttatttctcccccaaaacacttgccttttgaagtttattttatctacttaatactttcttctccatcttgcttttctgttaacctccatgacatttgttcatcttcatcaatggcttcagtacctgctatagtcttctctccactgttccagtgccagcattttctacttcatcccattcgtgacccttctaagaccttaattttatatttcttgaactctttgactctaattattattatttgcactaaagccatctacaagtctacttagaacaatccctaagattatgaactctaatacttcccttccttgtcctgctacccctcactcctagagaacttctgtttcctgttatttttatctctagttcattcattcatctcagttttcacattctattaactcattctattaatgagacttcattcatctcagtttttacattctgttaatatcaggactcacactactttcctatccagcttgttggtcaataactgtaaaagttttcactggtactttttatgcccttaccctgttatattattatactttctgttgccaggtattacctagaataactgtaaatccaaaagaagagagtgagctctcttcagcattttgtagaatttcagaactgagcttattgtcatctgcattttcattttttcaaagttattaatttgtgatcggttctacaagacaaagtgcaatgaagtgaaagagcgttgattttggccttggtgctgaaaagctgtaagagttcttaagccaactgattaaaacctctaggtttcttttttcttacctacaaaaggaagaagtggatttctaaatctatatatcatgagtcttccttttaatcttttttctcctgcatcactcatcactttgtgttagtgtaatttgtttatatgtccgcctttcttgaatgcaaagattctttttcttgatcatctgtgtattcttagtacctagcacattataaacactcaataaaaatgtggtcaatttataaattgatggtatccagccttaatctagatgccatttataccagcaggctgcttaccttattagcttgatcacatttcacagtttcaaatattttaattattcttaaggatccatttcttcaactttttttccctttctctgtccaactctcccaccccaccccaatatacacatacctcacactctcccttgccctctccctcattgcagtgagcttaccaaatgtgagtcatctggcataaatgactttattatagttttcctcctctgcacttcaaattttaattttcacccattgtctcccattccctttctgtagctgcttttggggggctggttctgctctgtcggcatctgccccctcatctagccttttctcactgtttttaaatctcttcattctgaatagactttttcttgaccctgttttcttcccataccagaggagtaacacagcttgcttttacctccaaactttttcaaagagatcaagcccttatatcatcatttcaggaatatgaaggtcaatctcattgttttgctttcttgctgtttttgccccagtgcccctactcagattagggaggagtaatttaagtattccaggtctcttaattttttgcctctttgaaatatttttacaaggaagaagagaatctgctggtcaaaccattgtaatttttgcaaatctatttgtttttctgatactaacatataagagttttgaatgatttacgcatacttcatgataagaagtatagctttgagtattatagatgagtacagggccgtaagacgatttagaagaaaaaggatttcttttatanataatttctgaacatcggtatgttttctttgcatctctcttaaaactttgaattaaacatactcaaaacacttaagtgcagtgactcacgcctgtaatcccagcactttgggaggctggggcagggggatcgccagagctcaagagtttgagaccagcctgggcaacatgacaaaaccccacctctaccaaaaatacaaaaattagccaggcatggggggtgtgtctgtagtcccagctacctgggaggctgaggtgggaggatcgcttgagcccgggaagtcgaggcagcagtgaaccatgattgtgccattgcactctagcctgggtgacagagcaagaccctgtctccaaaaaagaaaaaacaaaccaaaaaaacccactgaagcagacacttaactgcctttaatctgtacacatatgtacagaaatgttggcttccaagatgaatttgtgttctttgatacctgcccacaaaatgtttgagttgttatttttgttttttctcttattaatcttttaaaatgtgatttaaggtgcatttcttgttattttaatgtaattacaggattccaaatgctagctagaccataattatctgttgggaaatatgaagactgttctcaaacttaacctttctgcatatagaaatctaagcagaaagaaatctcaataaacactgtgcagatggttctttctgaggacatgagttttgttacttgtcacactttttaccaacagtatgttttagaaggcgtatgataaatgcagtgacataaggagcttatgttaatgtatcagtaggctggcttgacctctcatgctgagtttcattgcctaccagacctggtattctcctagccaagtggaaccaaagattttgtataccacccacactctggcattctctacatacctattgaaattaaccacaccactgtaatcttgatgaatgctgtagcccgtgagttatattgattggcctggattggctttttgatggctatgtaacgatccactgaaatggcacagagatgcatgatggatgcggttgaaaagagaacgtcaagaaataaccaggcaggacatagaacaagtgggaggggccacatagcctctgaaagaaacaaaaacaagacaaacattttattctataaaatggcaactttcagtctacagtttttcaggtgatacatcttttgtcttttttgttactcatctgaaattttataactttaacaacataatgtttaacttcagataatggagacaacattaaattcaatatttctgtggatggtaacttttaaatacattttctattttgcataataattgtgccttttttctaagtcagcagcagtttaactttttagcattattatgacctttgctcttttgtcgattccatttgtgatctttttaaaatttatgtagtattgtgactggaacttaaccttggtatttaaataaaatttatttttaagtagctgttgtataaaaagaaaacattttaccatgtagaggaaacagtatgacaaaaagcgtattagaatgggagtctctgtgacacctgggttttgggctcacttctagcaataactagcagcaagatccttgtttatagcatactctagtttggtgaaatagtggagtgatttttttgacagaaatagttctcaaataaagattgcaaaaggaatggcttcagattatccggaagaaaagtagattgtttccccttctatatttcatcattcactccaaaaactggagataaaataattagtacagacttttgatttgaaaagaaaatctcagggttagacgtagtacttaatttatttaacaaactcttataaaacactgcatacttcatatagtcttaagcactttagaaatattaaccttaaaaaaattttaggtgtggatgtgatattgaatattctgcatagttttctaataaatttacttacacagatgttcatacatatgtgaatttaatatattatgcattatatattacacccaccacttaacatgtttacagtttcaaaacaactaaaattttagaattccccctagaatatttccattagaatccagtttaactcctgtagagaacagatgtcatgcatgtgagattatctaagtctcttttaggatttgattgttatatgtccactgataaaatgtaatctacttttcttctggctattgcaggtatatctgactttgacaggtataaagtgattgtcataattgaaggaaaaccagaataatcatctcaggattacagaacaacaagagactcttctattgttaactgtttaaaatttaaggagcctgggggtggagagagattaaaatctcagaccaaaaaaaaaaaaagcataatttaggggcagagtttttagatagatttggctgttattttcaagcatcaagtaggagatttttttaaagtcaggtaggatttcagtgaaaaatatctgggcacttgacaaagtatccagaaggtagcaaggctgacacatctactttttggtgccttctgtttccagagttggtatgtggcattctgaataagaatattaaaatatttcttcctaggaacaaaataacaaaatcagcacaaacttttactcagaaagaataaatgattgggacttagttctatgttcagcagcttcttaaaaagggattaaagcatcaagtggaaagggtcattcatacttttcagtgtattactgtaaataaactttgcctgcttgttgaattgggggtaggaagggatagaggtggtaaattttagatttattgagctggaaggaaccttagagattaccattgatcttgcagatgagtaaattcaggtataattaagtctgaatatagaggtaaggaggggaggcatttatttattgaaatgtaaatgttatctgaaagtgttatttagaactgccactcagagtttgctcttaagatggagagtgaggatcggcatcacctgggtacttagatatgcaggctcttgggtctcatctcagacctactgtatcagactctgcagttaaataaggtttccaggtgattcgtatgcaaattaacatttgagaagcagtgctttggaagactttctggtaaggtttgtgtctgagtcttaaaagatgcacctaagtttcctgttgtagggttggttataggcacttggaatgtctcatggaaaggaactaatgggaggcctctcngaataaattaagtcagagaaactggtgtttggagaaaatctaatcaattggattttctcactcttagccatagcattcagattttttgtcatttagtggaaaaggaccttggacacaggcagcttcaaagcgaactaacagtctaagtatagtgaaaagaatcattttagagtttgcagtggaaactactaaaaatgagggtacatcttgagctgaagttctagatttaggactgtaagtagggtggtaggaaaatactcgtctagagctataatcagagatattgattgcagttaaggatttaaaaggcaggtaattattgtgttatatcttagatttccttccttgaagtccttactctctctgtaacatcttttaaaatagtttgccaactatttaaacctgtctatttagctattctagttatggattatacttctgaagattaaggtttggaaaattctagtcataaatctagttgccataagcaggaagccataagaaaattcatataaaaagtacgtgtctttggaatttgaccatctgatccacatactcctaattgtgggctaagaaggaaagttttttagtgctgatttaagtaaccctatgaagccctgttagcctcactttaaacagaatttataaactcattcccacttaaaattcactagaattttcttattacagttagtgctttattgttaacagaaatattgagatgtgatacagaattttctttaagaaagaatgagactgaaatttataagagagatgaatctttacaattccaagcctttctcatttcaagtttcgtgaaacactggtggatagttttaatgaaactaatataaaagaaaaagataactgcattaaattaatagaaaccttatatacaacacaaaaaagaaaaagaggcttttttaaatgcctaatatatttgggtaatctaagaatttatagaaattaaaaacagttctagacacacttgttttataaaggggcttttcctagtctagagactttcattctaaaatcattttttagttagtattaatttagctcaaagtcagaaaagtttatttctgtttagaataactaaattaaaggttaagttggtatggtgaaatactttatttcaaaacgtttattttaggagttttggttttaagaatttctaattacattatttgttataatgtattctgtccaatntacttccacaaagacttaagacattgaaaatttgaaataatgaagtgaaacagttacatacttaaatggaaagaaagaaatgtgtatctaagggtcagtctgagggaaacaagttactaggttcttcaactaaattactgttattctggggctctaaattagactctttcattaaaattaagaaagaataatagcatttctgtcaatgcctgaaataattacagactgaatattaaagcaacaaaacaagtcctagatgggtcttgtcttatagacaattgtttaattatctaaagaatatcagtagcacaaatattttattgtttaaaatgaagactgctttaaattctgccatgcatgagggatggtaggagttgtcattcagttatataaatttttatttgtctcccagacaaggttcaacaacttcataggtatgggcctaggtctaataccttccacagaaaagagatcttgcagtcatctgaaggatttgtacaagtataggttgacgcacaagtattcttttccacttaatatgaaatataactttaactgaaaagaatactgagttctaacttgtccctaggggggaaaaaattctgtgatcctctgaacagttacatggggttatttaaggtataaatgttggttctgtatgccaaatatgacagttttggctggtcagatttctcattgacatttgagaaagcggaataataaaggttaagagtgtgaattctagaatcagtcctcctgggtttaaatcatgtctctgccacttactttgtaatcttgaacagattacttatccctctgcttctctgtcctctgtaaagtggggataatagtacctgttttataggatttctttaatagagtttatatggatgatgattaaatacatgtgaagtgtttagaacagttcctggcataaagaaaacactcaataaatgttagtgcttattactattgtttaacagaaactagccaactaactcaaccatgaaaacactcctacatagaaacaagccaaatcatcagtatgaaataagagtgtttgtctttctacctgctgtagcaaaagtgcatgcatctgattcagcttaaaactttaagctgtactttccgggggtgagggaggatgggctgagaacagttaactctgtttaactttcaattgaatttgtcataaaagtatgttttttactaacgttgaattttaactgctgtttattttatatacggtacaggaaaataacctgtatgcattgcatgcctgggttttttgttggtttgggtatttttttgtttgtttttgctttcttttgaattagtacaaaaacctgaggagttttactagaaaccccgtatcttgatgaggcagacntattttatctgaaacctgcttaacctttgggcagctttttagtttgggaagtcaggttacactatttgtccggaaaataattagcatcagtccataaatctgggacataaaatgtttccctttggaggatgtaaaagactatttttaaaggcattccaagtgggctgttcctatagtttacagaggtactcagttcatgaacttattgcagcaggacaaatcataaatacttcttatgtccaaaaagaacataattttcaaatatacatttatctcagaaattctaatgcttctgtctttatcttccagaaaagaaagacatagttcagttcaaattattgtttaaaagtttctgttttgttttttacttttttcactacatttgagcatatgagttatcctggggttcagtgtctaatatgatagtgttttaaatgttttaagcattttaatgcttacagaattttttcctggtttttaaaatttccactttacaaaaagaagtgcctttaattcattgcttttctcctccatttcagaattgggtaggctaacattttactgcataaatgaataactgccatttttctcttactgctatacatttgtttcatctctgattagacttgcatctcaactaaatcatatttaatttgcatgcagtactctaccagttactattagtgcttataagatgctgggccctgcttgacaaggtgattgagctctgaaataataagtgattgaactctgaaataataagtgacttgcctgatccaacacgggagaaccaggattcagaccctgggatgtcttgcttcaaacagccatctttcagccattttatatactctttcagctataccacggatactgtttgaacttatagatcatgaggcatcaattgaaacttaagttatagccaggtttggtggctcatgtctgtaatcccaacactttgggaggccgaggcaggtggatcacctgaggtcaggagttcaagaccagcctggccaaagtggcaaaaccccatctctactaaaaatacaaaacttagccaggtgtggtggcctgcgcctgtagtcccagctactcgggaggctgaggcaggagaatcgtttgaacctgtgggtggaggttgcagtgaactgagatcatgccactgccctgcagtctgggcaacagaacgagactccgtctcaaaaaaaaaaaaaaaaaaaaaacttataaataaaccaataacacccaatggatggccagatgccatatcttcccgtgttacttttttttttttttttccctgagacagagcctcaccccgtcacccaggctggagtgcagtggcaccatctcggctcactgcaactctgtcttccgggttcaagctattctcctgcctcagtctcccgagtagctgggactacaggcgcgtaccaccatgcccagctaatttttgtatttttagtagggacagggtttcgccatcttggccaggctggtctcgaactcctgacctcaggtgatccatccgtttcagcctcctaaagtgctggggttacaggcatgagccaccgtgcccagcctcccctgttactttttaaatcacttataaaatgaaacaaagattcagagaagctcttaaatggtgaacatcctgtcttttttatatcagcataaggtgttgttttcttgctcaagtatttctaacgtaggtattttcaagccttgtgttataagctgttgatttgtgatcatggattttaggaattatggacaagacaataaaaaactacaactgtaaagatcaagtccagtgctcccagataggaagaagtggcagaaaaattgacctagcacaactcatttgaaagacaatgttgtgcctgagttgtcataatcttgggaaaatatgaattcaaaccgtatattgttaaatattatacagatcagtggttgaataaaatatctctcagtataaggacagaaggtccacttttatattttactgctcttatttttaaaatttcattttattagactacgagctagtatagtttttgtgttactttcattgaattcccctgcgatagctaaaattattgctcatagtgatagttaatcttttatcatagaaccaagaacgcttgtttgtacaaacgttagaagtcctaaagattaacactacaataagagtgtaaagtctaattctgccttttaaagttatcagaagttcttataaatgcattagtttagaaaaatctttgtgtttattaacttgcaaaaggttataaaaatatcttggtatttgaagtcaggtttccatttgtaatacatgcagttcccaatttatgaattcatcctttgaagtttgttagagggcaacatgtgtttttttcctacattttttcatagaaattgaattatgctttaaataatgcaataatgtattagatagtagttcacagatttgttcattttttaaaaatctacaaaccccactatacaacttatttctgatagtaaaagtgtttggggctataaaatattttattttgtaattagaaattaacaaacatgagccaggcatggtggaatgtgcctgtaatcctagctacttaagaggctgaaggcagaggatcacttgaacccaggagtttgaggccagcccaggcaacattgccagactccatctctattaaaataaataaataaaaataaatttaaagttaataaacatttggaagaatgaaataatattaaaatgtctatcaattatttaagacataaatatgaagacatttcacatattttatgttaacatatgttgggttttctgctaacttgtattgctaaggatatgttgggtaccagcattttaaatatacacttaaagttttcagctgctggatacctatttttctatagaatacatggaatctattaaacaggtaaatctttgttacctgtttttgtattttgtttgttagctcactttaattctatggtactttgccttttaagattccttaactatttagctgataatttaagtatctaccatggtactttgcatataatagatgtttgatatttatggactcaaagattttaaagctaaaattcacttctgcataattctttcaatatcatgtattgaatgacgtattaaattttatggtagtctgaaataagcattttgacattttctgtgtgcctagcaaagcacagtttgaagagtatgattttacatcttaagctactattatgcacatggagatgagagctagaatcatatgcctgtacagtatttatcaaatatgcatatatatttctacataatactttcttttaagctttattcagaattagggttatgttctctattatagtaagatttcttaattatttttcatggtttcatgcagcattagattatttaaaagattacaaatttataaaacagggagatagaaagactgttaattattagaaagtctaattaaagcagtagaactttactcattactgcttgtcctgccacataattttcttgatttattttaaagcccaggtaaatgttgatttaaaatggaaggtgtaaacctgttactatctgataatagttttagatatctttctgttattacttataaaattgtaatgtgtaaaacctgggtataatagttggaatagcaggggttttttaccttctaatatggattctagtttaataaattttacttctgtaacttaaaatatttttatcttcatataagtaaatataattctaagaaactatatctgccacaagtaatcattttgcttaggcagtttatgaatggaatatcagtttataccaagcattgaataagttaaatatccttttaatgctgattccaagggtctaggagccctcataattcatcagcagaattatttgtgtttatccaaattttataactagagatgatatgcagaaatctggaactacttatatcttttttttattatagcaaactaagatttcagtgtcaaactataccttttattatcgcaataactaggttttaatccacttaccaacttagaggcctatcaggaacacagatgcccatatatcataaaaaaattgaatcgatagatcatctctttggacactctgagccaaaccatttccttcagcaactaaacataatttttcttaacatgacacatatgtaggaattgtgttcaagtttataatatacaaactattaagagctataataagaatttttggacagttccaattttaaactggggtttagtgatttaaattgggatttagtaattcaaagaccttatcgttaacccagcgcatatctgtcccggaagtgtcctagttattgctttgaggaaaaaaagtatcagtgtagaaaagttaaagtataggcctatttactataatttatagataatatattcagaatctataaatatcactaacttgaatgactttttaaatgattttattagatagcttaggagggagaaaaatagtttacaaaaaatattttttgctctttaaaactgctgatcaaccatagagaatgatataaaacaagggactgtttacttgccgtatctttaaatagtccaagttcatcttttatttcaagaaaagtaaagattaaatgagtgtccattctctaatagtatatcatagttctgtggtttgatggcacaaacaaagtgaaatacttaccaaacattattgtcaagagggcaattggcatcacaaacaatccaaccagcaaatcagccaccgccaaggacattagaaagtaattagtagcatactgcagcttcttctccagtgaaacagccagaataacaagggtatttccaccaattgtgggtattatcaccatgagtatcagaagagctgcccagtgcagtttatttccctgttcctcaacaatctgtttcatttcctctggtattgattctgtctgtaatccagaccagttagaagagataacgtgaacaaaggtgctctgcaaaatgtgctcaggaattgtgctttgaagttcagacactctgtaagagagagccatttgctgtttttctgtgattcaatcccgttccgaacagtggtcagcatggttagtagctaagctgctcatctgtttttttaaggcattgtaaccatgccaaacactcaaaagccaaagttgacaccttcctttaaaaaaaaaaattcaagttctctaaaatgagcgcatacacacatctgtccatgtttgtaggtaagatatccaagtatttattattttctagaggcttaaatttaggaaagctcagtgaaagaaactgatagctgtgaaaaaaataggatatatatatatttttagtttctctctctctctttttctgccgtagttgtagagtcgtgtttgaacttgcatgccagagagttccccctagatacaaaatacatagactgcattattttattcatttctgaaagtggtaaaaacacttgaacttcatagcccttcccttcttagtaagtctgttgtgcatttgtgacaatgcagccaattctccaaatatactgtatttctgatgttgctcagttaatgaaacagaagacacattaattttttcaatggttataataaaaagttaggtgtttcctgacccttgaatgtctttttacctttacttacagaagaatagaaaagtcgaaacacaatagttcagaatagaacttttagtatgcgctggccacccacctagaaacactcaaagcccaacaagggtctaaataaatgttttaccagctagggatccttatatgtaattagctttgtcttatcaggtttgtgagtactgatataaatgtcattttagatttcctttagtttgagagaaggaaaaaaaaaggtattactaggatccaaataattgtgtttagtaatttcatctctcatggtatgtctttgcaacaattgtgttctaaatttaatcactaaatttgccaaattcaaaccagttctttttttgttttaagtagtgtttatttttttaaccttcccagttgccttgagaagaaagggaaaccaaaaggaagattagaccatttatttgttcatcaaatgtacaaatcacgtttttaaaaactctcctttagcattagtaaatttttcattttgatttttaaaccgctgaatagaaatgaaagattatgatagcagaattcttgaagattaaaaaaaaaaacctttagattaattccatatgtgtttattaaatgcttacctctggtttcgttgttattttgctgagcatgtcatcttatctgttcactagacttgcttgctgctgtgactgaaatcctcctcccattgacttattctgagcctccagcacaggcggttgaaagcagtgaaacaaatacgttgtatagctgcaagcatgccaaggaggttatttcctctttgatacattcatttttagagagtagcagcattcattgtaattcataaaaccactgttaagcatgttgaaccagttcatggcccttattcaagttatatttttaagagctctctttaatatttggggggactgtaataaacttgatcattttagcttcagatagttttgtttggggttaagcctgagctgtttttcacatttgagaaaaaataagatataatctagctattttagaggtttcattctttgaagattctgccgttttaaaagcctatagtgatttctacagttctgatttctagcagtgaaacaagattcttatctagcttttgtgcctttgctgtggaacaccattaatttgctctggttgcaaccttatatagaagagcacagaaaggcctgaattctacatgtatacataggttttagcagaaacttttttactgcttatttttaaacagatgatctctgggtttaggagtggttcacagctttttttccccatagactttacgttggagaaaatacaagtaatgaaaatacgtttttgccttatttcagaaaattggtgtttaaatcttaatagttatgctatttaagttttctgtaaccataagactagcttagtattagaacctcagcattctcaaggtttccttttaaaagatcattatagatgcatattttaaaattaattacttataaatcagtgatgacatttgtgcccttttcttgtttcaaatttgtattcctttgctcatgttgaatgttattggaaaatacttagttcattttagctctgctgagcacttcagattttattcagtatttgctgcttttttaaaaactcaaaatttactatattagaaaaaatacttgtgaagaattctagatgaaataatattcaagagaaatcagatgttttttaatgtaccagaatttctattcaggaatatgaaaatattttaaggcaaggtgcggtggctcattcctgtaattccagcactttggtagaccaagacaggtggattgcttgagtctagaagagaccagcttgggcaacatggcaaaaccccatctctacaaaaaaaaccacataaattagccaagggtggtggttcacacccgtagtcccagctactgggcggcggcggaggggttgagggttaggggtcaggggagacctgaggcaggaggattgcatgaacctgggggaggtcgaggctgcagtgagctgagatcacaccactgcgctccagcttggggtgacagaatgagatcttgtctccaagattaaaaaaaaaagaggaaaagaaattatttttaaatactgcttagttgtgagttacactttgacatctgtgcttatgaaggcaggtagggatctgcaaaacaagtaatgtcagattgaaaatagcagcaccattttatatccagtgaaaagacttgtatgaaataagcctttattgatttgtttatagataaaattttttaaatattaagtatattataaaaatgcagtcattgttgtattttgcctgtattaatcctttcactcacattcactcattttttgcctcaacttataaaaagtaagattggtactctgattttttttatttttgcttttttaagtctgtttaatgtctaaggaacgtaactagttagaacagctacttatttggcaatctcaagttatgggaagcatagctgagaatcaagaaaaaagcaaaataataataaataaataattatataaaaggatagttgagtctcagcaaataactaaacctgtgctctaaaaccctaagcactttaagtagaaagtagcctctaagtccccactccatatctttttactctttacacacatacacgcacacacacgcacagacgtatacacacacacaaaactttgcctctcccccttctttagtgaaaataacatttgtacatggtggtagatgtagatagtacaaaagaatgttgagtgataaattcatgtgagacaattttaataaacatgtttccctgcctactccagatttgagtaacaagttaaaaggtggacaagcactttgataatagcaaatagggtcaactgaaacagcaacaacaacaacaaaaaaaaaaaaaacaagaatttaaatgtataaacatgtaggtctactcaaagtagagacttgtacctttttttgtgtttgtttttgttttgttttttgagacagagccttcctctgtcacccaggctggagtgcagtggcacaatctcagctcactgcaacctctgcctcccaggttcaagcaattctcctgtctcagcctcccaagtagctgggattacaggcgcctgccaccacgcctggctaatttttgtatttttagcagagacggggtttcgccatgttgaccaggatggtctcgaactcttgacctcaagtgatcgcctgcctcagcctcccaaagtgctgggattacgggcatgagccaccgcaccccacgccctttgacaacattttatgtggcataatgatggatagcacagtgatgacttctgtgtacttaagaaaaggctagatcatgttcattcagcaaataaatgtgaaatgaatttattaaatatttctatgcaaataataagaaatataaaagtatgattcttaatggtagagtgaagtttttaatatctggaagcttcatttgtgtagaatatttcctttcccaaaagcttcagataaagtaactcttactaaagtaacttcaaggtcagactcagcctctaatccagtaataaccaaaaaaacctaattggcacatttttttctaagacaattgaattttctccctgatgtctttttaatttattgagcagattctgtctttgaccgaaaagggcagtctaatattctttataggtctaggaagacagcttaaatatcagccaagaacacttttttacctctcagtcataatacctattaaacagtaaccataaaggaatgtttaacatgacagggattgtatctgctacatattcatttgtgaagtatttactaagtgccatatgctcatggagatatattaatgaataaggtaaacattttctgtcctcatgtaatttataattttatggaggatgcaaacaagtatattggtaactatagtacagataaggtagaactaagactagctcacttcaacaggacctacagtggagttcaaatatttctcagctttctttttattcattcctctcatgttcattctctttgacaagatcagtgaaagagctgaaactataagaatagctatttcaaacttaatctgttctcgttagactccttcattctcttctgactgcctgttattttaacgaaagactttgacaaatcaaaaacaagcttccttcactgtcttctcaaaatgtctttcttttcatccatcctatccttctttgggatcatgttatcattcctttccacaattgacttctacttaggttcttgatcccatctcatatgtatatgaagtctgtgttgcttcctctggcattaacagcctataccaggagtgtgataggctgccatctctactgtcacagctagtctaggagtgggggtgtggtaggcagacagtttaagatgccacagtgctgtcttaccacaatacagcaccttcttctttaagccctccccaggttaagttttttactggattcctgtgtaaaagttgatctagacaatttttgccaggttattgccagaacaaaagaataagatttttttttgtcatcgaaactctagagtacaacctgatgtcataaaatggtgttgtcctttaatcaaaagactgctatacctggaattatagttgatgatcataacccaaatatcttttggagtagatatgctcaactctgcatgtcctcagtaatcacagtaatcagctattagaaatagacttttatcattagaatacttgtttaaatatcagaagtgattaaaactttttgagaatcaaagtacatttatgttgattactataaaaatcaaagaaatatcaatacagttctcaatgaatagcagtaagttgatggcagctcactcatactgcaagacttttcttagtttgctgattagaaatgaaaacaagtgtgctaataatgctgcaactttgaatattacagatttctgtaggtccaggaatgcaatctgagatttttaagagctctatttattatggtgacacagcaatttctttgtataaggcttgtgactcttcttacatctttaaaattccctccctcgcccattttagcagcacctgaaaagtattagtctttttggaaatgtaccaaaagcttgcctaaaagtatactaatttttagttttctgaagtccaggaagatgacaacaaataaattctctttcactgaatttgtaacatttatggcacagtctgtgtggttttgttttttgcttttccttgtggtaagttatatgtattcactatatactaaactgataagagttaaaagctacaaatagcagtagcttagaatatggaggtacgaagaacaaaagtatgtttgggaaagaaaattgttttctttctcagctttttccctgaaaatgttttatgccacaaaattcaaaaaagcataatatatttcccctacttttttgttttttacctgtaatggcactgtttgtttgttttcgagacggagtctcactctgtcacccaggctggagtgcagtggcactgtgtcagctcactgcaacctctgtctcccgggtttaaacagttctcctgcctcagcctcccaagcagctgggattacaggcgcccaccagcacgcccagctaatttttatatttttagtagagacgggcttcactgtgttggccaggctggtctcaaactcctgacctcaggtgagccaccacacccggccaatggcactgttgtttcttttattattattacaagttgtatgaactagccaaagaataaaataaaggagaacaagaaaagttcctcagattcccacaacatgtagctctgtcgttgagtacacatgcagctggcaaatttataattgtctaagtaaatatacttttttctgtaaatatacttttaaataacatatcaaaacatgtgaaagagctaagttataggtaacacattctatgctaataaaattgtctaccaagtattgatttctttcctctccactgcccttccctaaaataaagtccagtgtttttcctgtgacttgaccatttctcaacatttagttttctaaatacgttgttttgttttgttttgttttttgagacaaggcatcactctgttgcccaggctgtagtgcagtggtgtgatctcagctcactgcagacttgacttcctgggctcaagtgatcctcccaagtagctgagactacaggcatgcacctccatccccggctaatttttgtattttttgtagagatggggtttcgcgggaatgccaaggctggtcttgaactccagggttcatgcaatcagtcctcctgcctcgacttcccagaatgctgggattacaggcatgagttactgtgcttggccagtttttctaaatatgtttatggagacatagaaataagctttattgctgattaaggattagtcatttaaatactttgttataaatgctgatccaaggtattataagaaactggaggaattatttcgtgatgttatctagaaggcaaatgtttatactgaagaaagatttagggagtgtcagaattattgaaaataactgaaagaaagcctagtggattgttactaatgatttaatgtattttcttttaacctgtaggttctctcttcatctcttgccttgccctctttttctttgttttcttcctccttgcagtttatttgttgaagaaaccagttatctctgttttgtttcccatggtatgaattttgctgagtgcatctttacatgtagtttaatgtgttgtttggtccttcacatttcctgtaaattgacagttgaatctacaagcttgatcacattcacattttttttagggtggtggggctggcggtacacacagttatttccattttcatgatgttagcagtcgttgataatcatgctgcgatctattcattatatgttacaaaatggtgatataattttatcatttattaactgttcctttaaaagtttatatcatatatctctgtgtgtatatataaagattaatgtgcaggagttttgctttcagtgaatgtttgcattccaatcattgcttagaaagtttttttgcccttgccgggcgcggtggctcacgcctgtaatcccagcactttgggaggccgaggcgggcggatcacgaggtcaggagatcgagaccatcccggctaaaacggtgaaaccccgtctctactaaaaatacaaaaaattagccgggcgtagtggcgggcgcctgtagtcccagctacttgggaggctgaggcaggagaatggcgtgaacccgggaggcggagcttgcagtgagccgaggtcccgccactgcactccagcctgggcgacagagcgagactccgtctcaaaaaaaaaaaaaaaaaaaaaaaaaagaaagtttttttgcccttttagagttgcctgctgaaacattgaaataaacatataagaatattatggttttactgtactcttgaaaagattgaatgtctaaactaatttaataaagaatttctcatttcttgtcttaacacttgttttttctaaagaatgtgtcagagttggaactgttgttagattgagacactgtcaggttttttatatgcttttgagtttatagccttcacagcctatttcagtctttattgcaattaactaggtaaagttctgcattaggctcctggtatttatgttctcaggcaaaattttttctaaacctcatggaattgttagtgccttttgggaagcaaaacttaagtctaacttctatcccctttcagaaaacttttctactaaagaaaagaacttgagttttgtggttggtttaagaatagtatatatgttatattttatttactcttttataacaagtaaaaatgacaaaataaatgaaatgttgacagattttaggataagctctttcctgtgagtcagttttccctggaatatcctgcccttgcagccaaggggtaacttgataagtatcctgcatgccattagttccctaacaagttgatgacgaaattctggaggtctgaaccctaaatataaccagctttctaggtttaatattcagcttgttttatattttgataaacctttggacatcaaatgttagtagccaaagttctggttctgatccaaagccagtttctggttatgcatctagatttcagtgatggtagtatggtattttcctctaccactccaccgactctccccagcatacataaggaggagcaggtattgttttatggataaggcaattaaggctcagagaaatttagtgattgtcaccctgctaataaatggcagcactagaattggaatccaggtctttctgattctaagcctctgttctgtctaccacaacaaatggaagagaggtcaagaaaagagatcctttaaggaatcactatgttatttccagtgagaggtgataggaactgaaacaaggcaattggaaacagaagtaagatttaaggggttctcttgacttggcggcagattatatgtggagagtgagggaacagaatgattaaagatacgagtttcctaggtatgtcaatgaattgtcatggtgggaagagaagcaacttggagagggatgcccttttttattcctttctttgtgggtttttaaatgttgattgaggtttgtggtatacttggttaaagatttccaataggcacttagaatttcagattactactcagattatttggaatctgttgttagagagtacaagggaattaaatagagacagatatattctttttttgagacagtgtctcactctgtcgcccagcctcctgagtagctgagaccacagatgcgcgccaccacacccggctaatttttgtagtttttgtagagacggggtttcaccatgttagccaggctagtcacgaaatcctggactcaagcaacgggggcagatatattcttaattgctgtgtattgagttaatcctctaacactgtggcacttacctaatgagaattataaattcataattctgctaagggactatcctgaggcttaaagcctgaaaaattccctctgaattcttacctagcattataggcacatggccacaaaggtggttttcccagggcacagtttgtccattgcactttggatgagctgaccccttgatgtgtctaaatgtggaaaatttgattgcataatttatggtattgggggatgggggactgctttcaggtagttccctggggtcaggggggaagaattccctctgtgatagccccatttagaatagtgtttctgcctatctatgtatattgctgtttttcctcctttagtaaagatggattagagggggaaaagaaagacaccatattcttgaaagcatcttgatttattagtgatttaatgttgaggttgcacaaaatattcataaagaaatagtatttaaaagccagtgtgttgaaagaaaggaattcatatgtgcagtttatggtccaatgatatggcagtgacttatgcatatgcccttgcacaattcctgctctgtggaaggcttgtacaaatagtaacattggcaagatgactgttagttacaaaccaagaaattttattgaaacaacaaattagaatgtagttagcttattttggtgtgcgtttcattttttaaagcagaaaattacaactttttttcattaaaaattgaattacatacttaggattaaagcaaagtttttacttactgctgcctattatattataccttatgatgaaccagaagtatagtaatactaaagagcaacaaagttgtttttcattttctttacatgataattgtataaactaggttttaaagccttgggatacattccctcatgttacatttaaagattcgactcccaaaattctgtgttatctgtgtgtttagaggggcaggaggaaggagactctgatccaaaaaagatttagaaccgctgtatcagacaattggcagatagtcacataactaagtcccgagcgagcctaaaccaagacccagtttttccaaatgtttgttattgtctaaacctactgtgtcgtgtataataatcactcaataaatatgactgactagacccagccaccaggtcttaagaaagatagagagggttcttcagaaagctctgattcctgccatgcacccaagtggttattatgctagtagtcctgattttttatttctagtgttatcttcattattcctctacacaaaatcaatatggtttttctacctacttttcctcaagcttgtttctcacattccagtgttcattcctttccaacaacatttatccctctgctatcagaattgtgcccattcaagactcaattagccttagaaagaaatactcacaggtatgtcagttttccctggttttgattatctagctgaattataaatttaagggagaaagcaaaagtggaacaggaaagagcttggtgtatttcctagtgcttaaccattaggccttgaacttagtagaaaatacttgctgtctaagtctctaaatgtaaatttagtttaactctctttgtctcttattaagtaataaaaattattttacctatagtacctggcactgtgctaacaaattatgggagacagaaaatatagtctcagcccttgtgcagtctagagtggttttattggtaattaattaggtggcaaaacacttgagtgagtttgttagatgatttgggtatcaaattacggaaagagctttaagttcttagccttataggagtgaaaatagaagttaaatggtagtttcaactacaagttttagaataacttttcaatagcctctttggtgtaatatcattttaaattttatttttatttcattggaatgttactcattgaagaaaagttgtcctataataataggcattgatttaaacctataataattggttcatttttaaatgctgtagaattgtaaagttggaacagacttacagaacttctagtcccattcttcctcttttcagatgaggaaaggaccctggaatgtttggttgattgaacattgtctaaattggcccaactatttagagacaaaacaggaactagaacatgagttttagacttcatggttccctcttatataacttactgttatttttctcagtacataataactgatagcatatatgttattactatattttcagttacttgctcatctggtttttgttattcctggaaaacagtcaagaaaatctatctctaattataaaggagaaaacccaagtgatttgtctaatgtcacataactaacaaatttagcaaaactagaactaggacctagatctttagttttctaatatattgcttttttcacaccaccatactgtttttcccatactgtttctaataatactagtgacaattagtattatttccaaattattcatacaaggaagtttaggcaaactgagaacattctcaagaaagagtgatggactctattgtagggaaaaataatctaacctttccttactgcaaaatttcattttaacagttacagttttcataaacttcgttctactcctttgaaatttgaattcaccactgtctggagtttgaggctggaggacagttccaacatagaattatagatttgagttggtttgtggtaattgttttcattcataacaggatagtctttttttaaaatgcctttttaataaataaatgttttaattaaatgtctgaaaaccctaaaatgtcaattaattaaatgcaagtcaacttctatacagttacatataaattatattcagtgtaggatttcggttcactttagtatttttaaaagaaagtagggcaggacctccaaactcagtgcctgggccctaggaactatgaaggtcttgaaacagcctttctggagaagttggaaattcgggttttaatgtgaaatattcccatcttaaatggtgacaacttattttgaatttttttaaagtatgtaggccaaataaaatctgctacgggccagattgggcccttgggccaatagtttatgaattttattttattggtttgaattactgaaatagttttcttgctggtttttccaccttcatgcttttaacctgtcttgttcacaggtatctccttaatctttctaaatcatcattccatttatctgcaaaataaaatgcaaattgctaaacctgacattcaagacactgtatcattttgctcttaattgcctttccacttttattttttattacatgtgctacaaaaacactgactgtgttcaaattagacaagccaggtgaattcccatctctagacctttgctgacttactttccttatcctgatgcctatattcctcttcatcatttgtccaattcttccaatactttcaaagtcactttatgtctgcattctctgtgaattcgtctcctgaccactgttacctctttctgtgatatttttttctccttagcattcatatcttaggtagtttatgccgctttgccacttttatatatataatatatattatatttacatatagtatatatatattatatatattatataattataatatataaataatatatattgtgttatatatttatgtaccatatataattatataatatataaatatatatatttttatgtataatatatatttatatattatattttatatattatatattttatttatttatttttttccttgagatggagtctcgctgtctcacccaggctggagtacagtggtgcaatcttgtctcactgcaacctctgcctcccgggttcaagggattctcctgcttcagcctcccgagtagcaagttgcagttgcccaccaccatgcctggctaatttttgtatttttagcagagaggaggtttcaccatgttggccatctggtctcaaactcctgacctcaagtgatctgtccacctcagcctcccaaagtgctgggattacaggcatgagccactgtgcccgcctttaatacacattcttatgtgtgttggttttgtctcagtaaatgtttggcgatggtgaaaaatctagagctgtatatgcagcttcaaagtctaggaaagagcctagtttcttttttttctttcttttttttgtaatttcaacttttatcttagattctgggggtacatgtgcaggtttgttatgtgtgtatatagtgtgatgctaaagtttgtgggacggtagatcccgtcacccaagtattatgcatagtacccaatagtttttcaacccagcacccttccctcctccctccagttcccagtgttcattgttgccttctttatgtccatgaatacccagtgtttagctctcacttataagtgagaacatgcagtatttggttttctgttcctgccttaattcacttaggataatggcctccatctgcatccatgttgctgcaaaaaacatgatttcattcttcatggctgcaaaaaaatctttttattgaagtttaatatacattcaaaaacatgcacaaaatcattagcccacagcttgatgaattttcacaactgcatacacctgtgtaaccagtacccaattcaagatcataacattaccagccttccagaagctcttcttacattctcttctagttattaccctagtcctgctgctcttcaaggatagccactgtgccagccaggatcatcttttaaaagatggggtcaggtataccattagtcaagtttgtcctattttttatcttgttgcaaatatggagagaatgaaaaataatttctcttcttaccaacacaaaaataattgctaaagcaaaaatgcagaagtcagaatttcttcattatcaaggcttctttatcagtttattattcaactaaagtgatactgggggatttaaatctttcatgtaacttaggaaatgtccaggaattactataaatgacttttgtcttctggaacaaaatgcaaagtaaccaagaaataggaaaatagatgtagagcagtgtgctacccccaacatggctgttcctgccatggaggaggtaccagagaataactggaatccagacctatggctgaggactcacttatactgagaaaggagtcccctttctgtacatatattctctgaatattgaagatcagatttcttctatcaataattagaactctatgaaagatttttaattctgcaatttatgttttaaatgctcattgtttcctataactttttcaaaaacaacttggttaaaactcttctgtcttaacttaaaatagattacctataacagtggcttcgctttctgtttcttatcagaacccctgaacagtgcccaagtgttgtctctttgttgtcagagagttacaaccctcatgtgcgctacggagctgcaatggccttggggatatgctgtgctggtacaggaaacaaggtaaagcccacagccaatggggtcagttctttcttggcgccagactgttttccctcgccgcagaatttatgtaacagctgtaaaaatacaagtgcaatgtgatctgtaagagtaaacttgccatacaaagcttcccagtactccctcattctgcgatgctggattgcccaaagctgcttaagaataaatcgtcacattacatggatagctgtaactgaaacagtgcttttgaatttctttttgaaatcattgatttctgggttttttgtttttgttttttttgtttgtttatttgttttgaaacggaatttcactctttcatccaggctggagtgcagtggcgcagtctcaccatgttggccaggctggtctcgaactcctgacctcaggtgatccacccgccttggcctcccacagtgctgggattacaggcatgagccaccgcaccaggctttttttctttctttttttttttttttttttttttcttttgagtcttgctctgttgcttgggctgaagtgcagtggcaggaacactgcccactgccaacacactcagctaatttttttattttttgtggagaaggggtctcactatgttgcccaggctggtctcacattcctgggatcaagtgatcctcctgcctcagcctcccacagtgctgagattacaggcatgagccactgtgcctggcccattgatttcttaaaaaaaaaaaaaaaaagaagaagaagaagaagaaaataaaatagtttttgttgttgttaaataactactcaggttattttatatgattatgttacatgtttaatttgtataattagtattctggaaaacaaggttctcatccgaagccaccaaaatcggctgatttgataacatttctgttttaagcaaatcaccgatgtgctatttacctgttttctcatatctaaccttaataggtaacctggtatttgttaagccctcaaaagttataaaaaaagagttgaatggggtaaggtgatgatttgaaaacataattcatcatgagattcataaagaaatgtgctattgcataaataacaagtattcataattcacagcagtgacataatcatgacactttgactctcatagcacatatgcacaaaccttggccacctcccagaagtgaaccttttaacaaagtgtgtatgtataagactgagagcaaggctttgctcccagtgcctttgcatcagagagaaaggagtcactttttttatcatctgttgtccaaactcaaaacaaaacatagttgtaagtttatggactgattccaggaatctaaaaattttagattccttgaatttttttccaataaagaatattggtattgtgggccaggcactgtggctcacacctgtaatcccagcactttgggaggctgaggtgggcagatcacgaggtcaggagtttgagatcagcctgaccatcatggtgtgaaaccccatctctactaaaaatacaaaaattagacaggcatggtggcacacgcctgtaaccccagccactcaggaggctgaggcaggagaattgcttgaacccaggaggcagaagttgcagtgagccaaaatcccgctattgcacttcagcctgggtgacagagcaagactccatctcaaaaaaaaaaaaaaaaaaaagagtgttggtattgtgtacaaataagtttttctagtcacatgaaagattattgaggctgggaataaaaatagctatttttggccaggtgcagtggctcacacctgtaatcacagcactttgggaggcccaggcggttggataacctgaggtcaggagttcaagaccagcctgggcaacatggcaaaaccccaactctactaaaaatacaaaaattagccaggcgtggtggcatgcacctgtaatgccagctactcaggcagctgaggcaggagaattgcttgaacccaggaggtggaggttccagtaagccaagatcatgcccttgcactttagcctgggggacaagggtgaaactccatctcaaaaaaaaggccaggtgtggtggcttacacctgtaatcccagcactttgggcaaccaaggcgggtggatcacctgagatcaggagtttgagaccagcctgggtaacttggtgaaaccccttctctactaaaaatacaaaaattaacctgctgggcgcggtggctcacacctgtaatcccagcacttcgggatgccgaggcgggcggatcacctgaagtcaggagttcaagaccagcctgcctaacatggcaagagcctgtctctactaaaaatacaaaaaattagtgtggtggcaggtgcctgtaatcccagatactcgggaggctgaggcagaattgcttgaacccaggaggcagaggttgcagtgagtggagatggtccactgcactccagcctgggcgacaagagtgggactctgtctcaaaagaaaaaaaaaaaaaagctatttttcactacacatggcaacaattgtgtaaaaatttgtaaagagacatccctcctttccagtatttcatcctattctgtctgcttaccctgctatactttttttttttttttttttgagacagtgtctcactcttgtcactgtcacccaggctggagtacaatggggctatgatagctcactgcagcctcaatctcccagtcttaagcaagcctcccaattagctgggactgcaaacgcataccaccatgccaggctaatttttttttttttttaatagagactaggtcttgctgtgttgcctgggctttatttttcttcacagcacttaccaccacctgatatattttacacttatttattgtttgtctttgccgaaatgtaagatcactgagaatataatgttcactgctggaacctaaaattaaagctttgtttgttgcatgaatgatggatggcaagatcattaaaggatgtgatggtgaccaagttggacatcatctctgtcattacagagttttgttttttatttttgtttttatttatttatttgtttgtttatttatttatttattttgagatggagtctcactctgtcacccaggctggactgcagtggtgcaatctcggctcactgcaacctccgcctcctgggttcaaacgattctcctgcctcagcttcctgagtagctgggattacaggcatgtgccaccacacccggctaatttttatatttttagtagaggcggggtttcaccatgttggccaggctggtctcgaactcctgacctcaggttgtccacccgcctcagcttcccaaagtgctgggattataggcatgagccactgtgcccggccagtttttttatttttaattaatttacttatgttttaatttatttggggggagaatttcttacatgagaatgtatcttcagttttactagagatgtcattgggtatatcgaatgtagttatagaaattggccttattttttttctacaacacatctgttctgtaaacaaaggaagaatatagttgtatgttttactaagtatttcccccctcgagtcttaagttgacatttatgtcaggcctcataagttaaatgtaaattagattcttttttcttttcagattattctgaacttaatatgatatctaggagcaaatgttctttgaaacacagcatctgacaagttaattgaatgaaaagtttttttattactcatactaaacaagcctttatttctagataatttatgtgatctaggtatcagtacctatgtaactagtttgggacttttttttaattatttcttaaaaacctgaaacatctgtttattctaaaatataccattggggttgtattatgtacctcaaaggccgagttactgtcttttaccttctaaaatggaaatttggttatatttttatcatgactacttcataaagaatattgacaatatgtttgaaaaacatactccctgtgcacagtgtcattacatgtttcagtaatgtagggagaaaggatacccatatctgctgtgtgtattatctgttaatagctctaattttaatatatatatgttaagtttacatgtagaggaatccaaagtcactttccaacaaaggattcagttcattcttttccttggtcttggaatgaaggatacttgagaaacatcctaccaaattaagaaatatctgataatcttacaagcctattactcttttcgtcccagatttatacctacctaaggaccttgtaagggatgttgtggggttttttgttgtttttcttgttgttttgtattttttttttaactctaatctcaatgacagattaaaggaacgttgtgggtttggtttggtttggtttggtttggtttggtttggtttggtttggtttggtttggtttaagacagagtcttgctctgttgcccaggctagagtgcagtggcgctatctcggctcactggaacctccacctcctgggttcaagtgattctcctgcctcagcctccccagtagctgggattacaggtgcccaccaccacgcccagctaatttttgtatctttagtagagacggggtttcaccatgttggtcaggctggtctcggactcctgacctcgtgatccacctgcctcggcctcccaaagtgctgggattataggcgtgagccaccgtgcccggccagggacattgtgttttaaagtggctcttcccaaaagtcctgcagagtgtgaatagaagttatacggggcaaaagagtttttgatcaaatacattggacaaatgctggtataaacaacagttgagtggtttataataaggcatcctagaacttttgttatgatatgtatattcctagaacctttgatacagtgtatacatatattttgtatctgcaagaggagatgatatatatacagtatgcctgaactcccaaacttatttattaaaggacttcttttttcatagaactgatattctgaagaataggatattggggaaatactgataaatattttggaaaatttcatcacttgtggtcttaggaagtgcaaccatgaaatcaattctagtctatgatttcatttgttttgctattctactagctagtaaaatattttgtttggaaaattttgggttttttgtttgtttatttttttgtcttgatttaacttttaaaattaggtcttataaaatcatctgagatgttaccttactctaatatttgtttattactatttttcttttttcttttttatattagagacagggtcaactatgttgcgcaggctagtcttgaactcttgggatcaagtagtcatcccaccttgcctctcagagtgttgggattacaggcgtgagccatcgcacccaaccttacgctaatatttgaaagaggtttgtttcctttttttttttttttggagacagagtttcactcttgttgcccaggccggagtgcaatggcactatcctgcctcactgcaacctctgcctccttggttcaagcgattctccagcctcagcctcctgagtagccaggacttcaggcacccgccaccacgcccagctaattttttttttttttttttttttttttttttttgtatttttggtagagacagggtttcaccatgttggccatgctgatcacgatctcctgacctcagatgatccaccctccttggcctcccaaagtgctgggattacaggcatctgccaccacgcccagctaatttttgtatttttagtagagaaggggttttaccatgttggccaggctggtctcaaactcctggcctcaattaatccacccactttggcctcacaaagtgctgggattacaggcacaagccaccacgcccacccagcctgacagaggttgaattatacaaattttggattcagactggcctgggtttgctatcagtacttactcgactttgggcaagttatttaacctttctatctctcagtttctttgtttataaagattgttttgtgctggattttgtttgttttaggagtaagagggttatatagcataatacataaaatacctagtactgtgtctgaaaagtaataggtgtttatcaaatgttaatcccattttctcttaattttttatgacctcttacctcaagacgagagcgctcaggttctaaagcttccttttcacttaccctcagttatattgaaatttaagtaaagcatgaccagttctaaactattccattcacgtagttgttaattaacttcttactacactgttggatgaaattattgacttagagtgacagtagatatagttgtgcatcatttaagaacagggatgcgttctgagaaatggcagttccgtgaatgtacaaacatcatagagtatacttacacaaacatagatagttatggtctgttgcttccagaatacatacctgtacgtcatgttactgtactgactaggcagttatggtaaaaatacagtataaaagataaaaaatcatacaactatatagggcacttaaccctgaatggaacttgtaggactggaacttgctctgggtgagtcagtgagtgagtgttgagtgaatgtgagggcgtacgacactattgtcactataatagactttataaacactgtacactttggctactaaatgtatacattttttcttcaataattgatcttagcttatctttttttaataaatttttaattatttttaattttttgactcttgtaataacacttggtttaaaacacaaacctgggcggacacagtggctcacgcctataatcgcagcactttgggaggctgaggtgggtggatcacctgaggtcaggaggtggagaccagcctggccaacgtggtgaaacccatctctactaaaaatacaaaaattagccgggggtggtagcatgcacttgtaatcccagctactctggaggctgagtcaggagaatttcttaaacccaggaggcaggggttgcagtgagccaagatcgcgccattgcactccagtctgggtgacaagagttgaagctacatctcaaaaaaaaaaaaaaaaaaaaaaaaaaaattgtaccattgtacaaaaatattttttctttatgttctgtaaggttttttctgttttcaaaatgatttatttatattttttaaacttttttgtaaaaaactaagacacacatacattatactaggcctacacagggccagtatcatcaataagtcacttaggcaatagtaatttttcaactccattataatgggactaccatcatatatgcagtgtgtcacttcccagaatgtcgttacatggcatgtgactataaattgaaagttcagccatatcaactttatttaaaagttgtgtgtttttttaaattctttcaggaagccattaatttgctagaaccaatgacaaacgaccccgtgaactacgtgaggcaaggggcactcatagcttcagctctcatcatgatccagcagactgaaatcacttgtccaaaggtgagcaaacaaagaaattccctggaagagagatggtttggtcttttctttagtaacttatcgtcttttgaggacgttttttagttcaaatatggtaaacactgaaagtaaagtaaaagtaaagagagcattttagagtataagagaatggggaaactttaaatatgtaatgctctttaaatgtattttttagacttaatggtccctttgttaatttaagtatataaccatgcttgaaaaattagaactcttggggtgttaaaaccgtaaaatgaactctttttttgcctttcactgtccttttaaaatgtattcagtgggataactttttcctctgataatataggatgcaaacttaggcagtccatgccttttttgatctgtccttctaaagtaatttttaaaaagcctgcagtcactttgtatcgtacataccatcttagtttagaaatgagtacatccacattctcttttggaatgtcattgccctcctaggcgatctttttgggtggagttccaaatggctccaagacagctttcttttccacttgacccacatctgctccacagaaacactcttgtacattttgcccttctgcataggaatataataggatgtcagtgctagtacctcagctaatagctaatgtctcagtgcacagcagcccctgatcatattggacactccaagtggaccctctgaacccctattctgtaaacttggagtgagggggaaagactcacaacccagcttgccccaaagagatcctcttcacatatcctccacaatccacacccaccttgtgggtgactccataatagttttgagacacctgttttaaaattctctgatgagcccagcatggtggttcattcctataatcccagtactcccggaggctgaggtgggaggatcacttgagcccaggagttcaaggctagcctgggcaacatagggggaggccccatcactacaaagaattaaaaaggaattagctgggcatggtggcatgcgcctgtagtcccagctatttgggagctgaggtgggagaatcacttaagcccaggaggccaaggctgcagtgagctgtggttgtgccactgcactccagcctgggtgacagagcaagaccctgtctcaaaaaataaaataaaattatctcatgataatctctcagtcctcaggttgttagtgtttgatatctcatgtatcttgtcatttcagccaaaacttctcattctactaagaaacagaaaatgcatgtatcttatttttaatacatgtactaaaattagcattgatatactaaatagacacgtgtagcttacacaacaatttcagatcttctaattcttaaagctagggactttagtatccatgtattaattaatcctgctcatataatgggaagtagtcaaaaaattgacaacagaaaaaactgttggcattgtgtcttatgcctcatcgagcaaataatagcacaccaccctcattttcagcaaagtagatttgaggaggtagagaaaagaaaaatttccggaactcattgattattctaattttatggagctttgtttaaaaaagttcaagttctaaacagttgctgtcatctttgcttcatttatttagtgcttctatttctgtctcaaaatcattttcaggactttcaaaaattgtattattacaaagatagaatctgacttctcatcctgtttttataacgtattacttaatatactacatcttctagaacataaacatctttccaaacaccacatttctttttgtttttaaatatagcagctatcatatgagtagcttttacatattttatttctgcttttgatcttcaactgagcttttggaggttatccaactgagtagtgtcattaaagaaacaaattttggtcatggaatgcacctcctctaacagtaatacatagacattcactttgaccccacatgttgctttcatgttacttgtattgtcagcaagacaaatgttctgtcttcccatcctctgctgtaggatttcattgattttacaattataatctctgttccaaaaatggcagagtcctttaggagctggataatcattccaggaactgttattgaaccaagtcttacctggtgcagatacatggggcacactcccatcttcaggttgtatcggaatcttagacactgattaaaatgtcaaagtgaagtcacagctagtagcctttgccantaatataaactgggtagataaatgtaagtgtatataccactgactaaaaaagcaaaattgacatgtgaaactcaaaaattctttcaggaaacactactctttagagcaaagttgttactcagcttaagaattcttaaagttaatttcattgttttctgttattaagcaagtgataaagaatttcatagactacagtttatatcatctttcctttatctgataattgccaacaagacaaaattgacattttggagatggtata

SEQ ID NO: 18 - DNA, 401 bp, Homo sapiens
  modified_base (201)..(201): n is g or a
agtttagccgagtcattaatttaaagagttgaggggaagggggattgggaggcaagggatatatataggtagtaggaacagaaagatagcaaggcatgtttgggagagctgtgagtagtgtcaagtgccagggaaggtggaggagatgaagtcttagtcaaaaacatacttgaactgctgtcactaaactgtagaagatcngatcagtgtttcccagatttgaaaatagaaaccgtgttttaaatttaacactggtaagatgaaattgtgcttttgctatgtcctgacatattctgttcatttgtctagacacgtttggcataatcaacagaaaccactggatgagtggttaaatataagataaatgagttataggtctgaatcaatcacttttgtatgag

SEQ ID NO: 19 - DNA, 401 bp, Homo sapiens
  modified_base (201)..(201): n is t or g
gttctaaacatcagaatcagtttagggaaagggaagaggaaggagcagaggacagggttccaagcagaatgaaatgaacagtatctgtttaaaggtgagtaagcctacgacagtagacccaatgggggaatataccacaaggctccagaaatactataggcccttgagagcattttagggaatgtggatttcattgtaagnctagtggggaaacactaaagaatttttaggaagaaaaaatatgactagtttcaggctttagaaacatcacttcagctgcagttttataaactagattgtggaaatcagaggccacaaaaaaggagacaaggattctgttgcaatatgtattctgtgacacataaacaagaaagacatctttaagtgaaatatcccactta

SEQ ID NO: 20 - DNA, 401 bp, Homo sapiens
  modified_base (201)..(201): n is a or g
caaacctaaaatgtctcttcttcttctccccatactgctattatcctctcccctcaaactgtatgcttgttttctgcctttccagtttttgtacaaaggatgtgctttgggaagattcatcttacattggtacgggatggattggagaagggagagactggatggacagtgaccagttagaggactgtcacatttgtctcnctgtaaagagtatttcatgaattgagatagctgtagtaagattgaaaaggaagataagaatcagcaagccttggtgaaggagatatgggtggctgcgggaaaaggagaacccaaagaaggcttatttaaccggtatctattttcccctagcataaagctaatgcgcctacagaaggtaatttgcagtcacagaagtgaat

SEQ ID NO: 21 - DNA, 401 bp, Homo sapiens
  modified_base (201)..(201): n is c or t
ggtggaggagggtgggggtcaaaccaggctgcaccgagcacaggtggtggctgagttccggttggcccagctccaggctgtggggagaagagagatggcggcattctttcggacgcttttatccactatgggagcaggaagacagccagggttatcacagcacaatttgaaaaacatacaaataattcatgtcagcataangtcatggtgttgtcaataatgaatccacacttaaaacccagattgatagcttcaaagggcagcccccacccctggacaggtaggcagggcgcagagccagcccctcttggttctgagaagcaaactcggaagcagttcaggtcagaggagtccagggaccgcccttgctgggaggaaatgggtgcagtgcggcccagcgc

SEQ ID NO: 22 - DNA, 401 bp, Homo sapiens
  modified_base (201)..(201): n is a or g
atccaaggacttttattagggaacacaagttcatcttcaccacattttgatgtaaaagcaatatgaatccaagatcaattcctcttttggtaaagatgccttacttcctgagaaacccttgttcggaagggacaggaatcctaggggcccaatattcaatccaagtagtcagatgtggctactgtctctttgcagaggagnaggtagaaagtcgaatcaattggttaagtgtcccatactctgccactgagacaactacagttttgctgctaaaagcagaacacagacttccagtgccagggcctgccaactagcaggcgtctcagaacccaaggcctaatgggttatcaatgccagcaagagttctgggaaccaaggccccacactgccaccagcaaggc

SEQ ID NO: 23 - DNA, 289 bp, Artificial Sequence
  Description of Artificial Sequence: Synthetic polynucleotide
atacagtcactttttttttttttttgagacggagtctcgctctgtcgcccaggctggagtgcagtggcgggatctcggctcactgcaagctccgcctcccgggttcacgccattctcctgcctcagcctcccaagtagctgggaccacaggcgcccgccactacgcccggctaattttttgtatttttagtagagacggggtttcaccgttttagccgggatggtctcgatctcctgacctcgtgatccgcccgcctcggcctcccaaagtgctgggattacaggcgtg

SEQ ID NO: 24 - DNA, 54 bp, Artificial Sequence
  Description of Artificial Sequence: Synthetic polynucleotide
gctctgtccacaggatcgcctcccatgaagaatccatcccatcttactgccagc
